(19) United States
(12) Patent Application Publication
(10) Pub. No.: US 2017/0044259 A1
(43) Pub. Date: Feb. 16, 2017

(54) ANTI-PD1 ANTIBODIES, ACTIVATABLE ANTI-PD1 ANTIBODIES, AND METHODS OF USE THEREOF

(71) Applicant: CytomX Therapeutics, Inc., South San Francisco, CA (US)

(72) Inventors: Kimberly Ann Tipton, South San Francisco, CA (US); James William West, South San Francisco, CA (US); Chanty Mariategue Chan, South San Francisco, CA (US)

(21) Appl. No.: 15/209,385

(22) Filed: Jul. 13, 2016

Related U.S. Application Data
(60) Provisional application No. 62/191,902, filed on Jul. 13, 2015.
(60) Provisional application No. 62/205,825, filed on Aug. 17, 2015.
(60) Provisional application No. 62/295,314, filed on Feb. 15, 2016.
(60) Provisional application No. 62/323,543, filed on Apr. 15, 2016.
(60) Provisional application No. 62/333,629, filed on May 9, 2016.

(51) Int. Cl. C07K 16/28; C07K 16/30; A61K 39/395; A61K 47/48

(52) U.S. Cl. CPC C07K 16/2818; A61K 47/48561; C07K 16/30; C07K 16/3015; C07K 16/3023; C07K 16/303; C07K 16/3038; C07K 16/3046; C07K 16/3053; C07K 16/3069; A61K 39/3955; C07K 2317/92; C07K 2317/76; C07K 2317/565; C07K 2317/56; C07K 2317/55; C07K 2317/54; C07K 2317/622; C07K 2317/569; A61K 2039/505

(57) ABSTRACT

The invention relates generally to antibodies that specifically bind programmed cell death protein 1 (PD-1), activatable antibodies that specifically bind to PD-1 and methods of making and using these anti-PD-1 antibodies and anti-PD-1 activatable antibodies in a variety of therapeutic, diagnostic and prophylactic indications.

### RELATED APPLICATIONS

[0001] This application claims the benefit of U.S. Provisional Application No. 62/191,902, filed Jul. 13, 2015; U.S. Provisional Application No. 62/205,825, filed Aug. 17, 2015; U.S. Provisional Application No. 62/295,314, filed Feb. 15, 2016; U.S. Provisional Application No. 62/323,543, filed Apr. 15, 2016 and U.S. Provisional Application No. 62/333,629, filed May 9, 2016; the contents of each of which are incorporated herein by reference in their entirety.

### FIELD OF THE INVENTION

[0002] The invention relates generally to antibodies that specifically bind programmed cell death protein 1 (PD-1), activatable antibodies that specifically bind to PD-1 and methods of making and using these anti-PD-1 antibodies and anti-PD-1 activatable antibodies in a variety of therapeutic, diagnostic and prophylactic indications.

### BACKGROUND OF THE INVENTION

[0003] Antibody-based therapies have proven effective treatments for several diseases but in some cases, toxicities due to broad target expression have limited their therapeutic effectiveness. In addition, antibody-based therapeutics have exhibited other limitations such as rapid clearance from the circulation following administration.

[0004] Under conditions of chronic stimulation, T cells upregulate and sustain expression of the inhibitory receptor PD-1 to negatively regulate the quality and magnitude of T cell responses. The primary ligand for PD-1, PD-L1 is upregulated on many tumor cells and has been associated with inhibition of anti-tumor T-cell immunity via its engagement of PD-1 on tumor-infiltrating T cells. Clinical trials have confirmed the capacity of antibody blockade of either PD-1 or PD-L1 to restore the activity of durable tumor-specific immunity in patients across multiple tumor types. (Herbst et al, 2014; Lipson et al, 2015). However, because similar mechanisms control anti-tumor immunity and self-tolerance, systemic delivery of these checkpoint-targeted therapies can also induce systemic autoimmunity that can be exacerbated with combination treatments; such as nivolumab or pembrolizumab (anti-PD-1) and ipilimumab (anti-CTLA4). New approaches are therefore needed that provide anti-tumor activity without deregulating systemic immunity.

[0005] In the realm of small molecule therapeutics, strategies have been developed to provide prodrugs of an active chemical entity. Such prodrugs are administered in a relatively inactive (or significantly less active) form. Once administered, the prodrug is metabolized in vivo into the active compound. Such prodrug strategies can provide for increased selectivity of the drug for its intended target and for a reduction of adverse effects.

[0006] Accordingly, there is a continued need in the field of antibody-based therapeutics for antibodies that mimic the desirable characteristics of the small molecule prodrug.

### SUMMARY OF THE INVENTION

[0007] The disclosure provides antibodies or antigen-binding fragments thereof that specifically bind programmed cell death protein 1 (PD-1), also known as CD279, SLEB2, and/or hSLE1. The use of the term “PD-1” is intended to cover any variation thereof, such as, by way of non-limiting example, PD1 and/or PD 1, all variations are used herein interchangeably. Aberrant expression and/or activity of PD-1 and PD-1-related signaling has been implicated in the pathogenesis of many diseases and disorders, such as cancer.

[0008] The present invention provides monoclonal antibodies (mAbs), activatable antibodies, and antigen-binding fragments thereof that specifically bind PD-1.

[0009] In some embodiments, the antibody includes an antibody or antigen-binding fragment thereof that specifically binds PD-1. In some embodiments, the antibody or antigen-binding fragment thereof that binds PD-1 is a monoclonal antibody, domain antibody, single chain, Fab fragment, a F(ab′)₂ fragment, a scFv, a scAb, a dAb, a single domain heavy chain antibody, or a single domain light chain antibody. In some embodiments, such an antibody or antigen-binding fragment thereof that binds PD-1 is a mouse, other rodent, chimeric, humanized or fully human monoclonal antibody.

[0010] In some embodiments, the antibody includes an isolated antibody or antigen binding fragment thereof (AB) that specifically binds to mammalian PD-1, wherein the AB has one or more of the characteristics selected from the group consisting of: (a) the AB inhibits binding of mammalian PD-1 to mammalian PDL1 with an EC₅₀ value less than 5 nM; (b) the AB inhibits binding of mammalian PD-1 to mammalian PDL2 with an EC₅₀ value less than 5 nM; and (c) the AB specifically binds to human PD-1 and cynomolgus monkey PD-1.

[0011] In some embodiments, the antibody specifically binds to the mammalian PD-1 with a dissociation constant of 0.01 nM to 5 nM, 0.05 nM to 5 nM, 0.1 nM to 5 nM, 0.2 nM to 5 nM, 0.3 nM to 5 nM, 0.4 nM to 5 nM, 0.5 nM to 5 nM, 0.75 nM to 5 nM, 1 nM to 5 nM, 2 nM to 5 nM, 0.01 nM to 2 nM, 0.05 nM to 2 nM, 0.1 nM to 2 nM, 0.2 nM to 2 nM, 0.3 nM to 2 nM, 0.4 nM to 2 nM, 0.5 nM to 2 nM, 0.75 nM to 1 nM, 1 nM to 2 nM, 0.01 nM to 1 nM, 0.05 nM to 1 nM, 0.1 nM to 1 nM, 0.2 nM to 1 nM, 0.3 nM to 1 nM, 0.4 nM to 1 nM, 0.5 nM to 1 nM, 0.75 nM to 1 nM, 0.01 nM to 0.75 nM, 0.05 nM to 0.75 nM, 0.1 nM to 0.75 nM, 0.2 nM to 0.75 nM, 0.3 nM to 0.75 nM, 0.4 nM to 0.75 nM, 0.5 nM to 0.75 nM, 0.01 nM to 0.5 nM, 0.05 nM to 0.5 nM, 0.1 nM to 0.5 nM, 0.2 nM to 0.5 nM, 0.3 nM to 0.5 nM, 0.4 nM to 0.5 nM, 0.01 nM to 0.4 nM, 0.05 nM to 0.4 nM, 0.1 nM to 0.4 nM, 0.2 nM to 0.4 nM, 0.3 nM to 0.4 nM, 0.01 nM to 0.3 nM, 0.05 nM to 0.3 nM, 0.1 nM to 0.3 nM, 0.2 nM to 0.3 nM, 0.01 nM to 0.2 nM, 0.05 nM to 0.2 nM, 0.1 nM to 0.2 nM, 0.01 nM to 0.1 nM, 0.05 nM to 0.1 nM, or 0.01 nM to 0.05 nM.

[0012] In some embodiments, the mammalian PD-1 is selected from the group consisting of a human PD-1 and a cynomolgus monkey PD-1. In some embodiments, the mammalian PD-1 is a murine PD-1. In some embodiments, the antibody specifically binds to human PD-1 or cynomolgus monkey PD-1 with a dissociation constant of less than or equal to 1 nM. In some embodiments, the mammalian PD-1 is a human PD-1.

[0013] In some embodiments, the antibody or antigen binding fragment thereof specifically binds to the mammalian PD-1 with a dissociation constant is less than or equal to 0.01 nM, less than or equal to 0.05 nM, less than or equal to 0.1 nM, less than or equal to 0.2 nM, less than or equal to 0.3 nM, less than or equal to 0.4 nM, less than or equal to 0.5 nM, less than or equal to 0.75 nM, and less than or equal to 1 nM.

[0014] In some embodiments, the antibody has one or more of the characteristics selected from the group consisting of: (a) the AB specifically binds human PD-1 and cynomolgus monkey PD-1; (b) the AB inhibits binding of human PDL1 and human PDL2 to human PD-1; (c) the AB inhibits binding of cynomolgus monkey PDL1 and cynomolgus monkey PDL2 to cynomolgus monkey PD-1; (d) the AB specifically binds to murine PD-1; and (e) the AB inhibits binding of murine PDL1 and murine PDL2 to murine PD-1.

[0015] In some embodiments, the antibody blocks the ability of a natural ligand to bind to the mammalian PDL1 with an EC₅₀ of 0.1 nM to 10 nM, 0.1 nM to 5 nM, 0.1 nM to 3 nM, 0.1 nM to 2 nM, 0.1 nM to 1 nM, 0.1 nM to 0.5 nM, 0.1 nM to 0.25 nM, 0.25 nM to 10 nM, 0.25 nM to 5 nM, 0.25 nM to 3 nM, 0.25 nM to 2 nM, 0.25 nM to 1 nM, 0.25 nM to 0.5 nM, 0.5 nM to 10 nM, 0.5 nM to 5 nM, 0.5 nM to 3 nM, 0.5 nM to 2 nM, 0.5 nM to 1 nM, 1 nM to 10 nM, 1 nM to 5 nM, 1 nM to 3 nM, 1 nM to 2 nM, 2 nM to 10 nM, 2 nM to 5 nM, 2 nM to 3 nM, 3 nM to 10 nM, 3 nM to 5 nM, or 5 nM to 10 nM. In some embodiments, the natural ligand is a mammalian PDL1 or a mammalian PDL2. In some embodiments, the natural ligand is selected from the group consisting of: a human PDL1, a human PDL2, a cynomolgus monkey PDL1, and a cynomolgus monkey PDL2. In some embodiments, the natural ligand is a murine PDL1 or a murine PDL2.

[0016] In some embodiments, the antibody blocks the ability of a natural ligand to bind to the mammalian PDL1 with an EC₅₀ of less than or equal to 0.1 nM, less than or equal to 0.25 nM, less than or equal to 0.5 nM, less than or equal to 1 nM, less than or equal to 2 nM, less than or equal to 3 nM, less than or equal to 4 nM, less than or equal to 5 nM or less than or equal to 10 nM.

[0017] In some embodiments, the anti-PD-1 antibody includes a heavy chain that comprises or is derived from an amino acid sequence selected from the group consisting of SEQ ID NO: 1, 5, 9, 13, 17, 21, 23, 25, 27, 29, 31, 33, 35, and 37, and a light chain that comprises or is derived from an amino acid sequence selected from the group consisting of SEQ ID NO: 3, 7, 11, 15, 19, 39, 41, 43, 45, 47, 49, 51, 53, 55, 57, and 59.

[0018] In some embodiments, the anti-PD-1 antibody includes a heavy chain that comprises or is derived from an amino acid sequence selected from the group consisting of SEQ ID NO: 21, 23, 25, 27, 29, 31, 33, 35, and 37, and a light chain that comprises or is derived from an amino acid sequence selected from the group consisting of SEQ ID NO: 39, 41, 43, 45, 47, 49, 51, 53, 55, 57, and 59.

[0019] In some embodiments, the anti-PD-1 antibody includes a heavy chain that comprises or is derived from amino acid sequence SEQ ID NO: 21. In some embodiments, the anti-PD-1 antibody includes a light chain that comprises or is derived from amino acid sequence SEQ ID NO: 45 or SEQ ID NO: 47. In some embodiments, the anti-PD-1 antibody includes a heavy chain that comprises or is derived from amino acid sequence SEQ ID NO: 21 and a light chain that comprises or is derived from amino acid sequence SEQ ID NO: 45 or SEQ ID NO: 47. In some embodiments, the anti-PD-1 antibody includes a heavy chain that comprises or is derived from amino acid sequence SEQ ID NO: 21 and a light chain that comprises or is derived from amino acid sequence SEQ ID NO: 45. In some embodiments, the anti-PD-1 antibody includes a heavy chain that comprises or is derived from amino acid sequence SEQ ID NO: 21 and a light chain that comprises or is derived from amino acid sequence SEQ ID NO: 47.

[0020] In some embodiments, the anti-PD-1 antibody includes the combination of the complementarity determining region (CDR) sequences of the heavy chain amino acid sequence of SEQ ID NO: 21. In some embodiments, the anti-PD-1 antibody includes the combination of the CDR sequences of the light chain amino acid sequence of SEQ ID NO: 45 or of SEQ ID NO: 47. In some embodiments, the anti-PD-1 antibody includes a combination of the CDR sequences of the heavy chain amino acid sequence of SEQ ID NO: 21, and the CDR sequences of the light chain amino acid sequence of SEQ ID NO: 45 or 47. In some embodiments, the anti-PD-1 antibody includes a combination of the CDR sequences of the heavy chain amino acid sequence of SEQ ID NO: 21, and the CDR sequences of the light chain amino acid sequence of SEQ ID NO: 45. In some embodiments, the anti-PD-1 antibody includes a combination of the CDR sequences of the heavy chain amino acid sequence of SEQ ID NO: 21, and the CDR sequences of the light chain amino acid sequence of SEQ ID NO: 47.

[0021] In some embodiments, the anti-PD-1 antibody includes: (a) a variable heavy chain complementarity determining region 1 (VH CDR1) comprising an amino acid sequence selected from the group consisting of SEQ ID NOs: 653-657; (b) a variable heavy chain complementarity determining region 2 (VH CDR2) comprising an amino acid sequence selected from the group consisting of SEQ ID NOs: 658-663; (c) a variable heavy chain complementarity determining region 3 (VH CDR3) comprising an amino acid sequence selected from the group consisting of SEQ ID NOs: 664-668; (d) a variable light chain complementarity determining region 1 (VL CDR1) comprising an amino acid sequence selected from the group consisting of SEQ ID NOs:669-677; (e) a variable light chain complementarity determining region 2 (VL CDR2) comprising an amino acid sequence selected from the group consisting of SEQ ID NOs: 678-682; and (f) variable light chain complementarity determining region 3 (VL CDR3) comprising an amino acid sequence selected from the group consisting of SEQ ID NOs: 683-687.

[0022] In some embodiments, the anti-PD-1 antibody includes a combination of a variable heavy chain complementarity determining region 1 (VH CDR1, also referred to herein as CDRH1) sequence, a variable heavy chain complementarity determining region 2 (VH CDR2, also referred to herein as CDRH2) sequence, and a variable heavy chain complementarity determining region 3 (VH CDR3, also referred to herein as CDRH3) sequence, wherein the VH CDR1 sequence comprises GFTFSGYAMS (SEQ ID NO: 653); the VH CDR2 sequence comprises YISNSGGNAH (SEQ ID NO: 658); and the VH CDR3 sequence comprises EDYGTSPFVY (SEQ ID NO: 664).

[0023] In some embodiments, the anti-PD-1 antibody includes a combination of a variable light chain complementarity determining region 1 (VL CDR1, also referred to herein as CDRL1) sequence, a variable light chain complementarity determining region 2 (VL CDR2, also referred to herein as CDRL2) sequence, and a variable light chain complementarity determining region 3 (VL CDR3, also referred to herein as CDRL3) sequence, wherein the VL CDR1 sequence comprises RASESVDSYGISFMN (SEQ ID NO: 675) or RASESVDAYGISFMN (SEQ ID NO:676); the VL CDR2 sequence comprises AASNQGS (SEQ ID NO: 678); and the VL CDR3 sequence comprises QQSKDVPWT (SEQ ID NO: 683). In some embodiments, the anti-PD-1 antibody includes a combination of a VL CDR1 sequence, a VL CDR2 sequence, and a VL CDR3 sequence, wherein the VL CDR1 sequence comprises RASESVDSYGISFMN (SEQ ID NO: 675); the VL CDR2 sequence comprises AASNQGS (SEQ ID NO: 678); and the VL CDR3 sequence comprises QQSKDVPWT (SEQ ID NO: 683). In some embodiments, the anti-PD-1 antibody includes a combination of a VL CDR1 sequence, a VL CDR2 sequence, and a VL CDR3 sequence, wherein the VL CDR1 sequence comprises RASESVDAYGISFMN (SEQ ID NO:676); the VL CDR2 sequence comprises AASNQGS (SEQ ID NO: 678); and the VL CDR3 sequence comprises QQSKDVPWT (SEQ ID NO: 683).

[0024] In some embodiments, the anti-PD-1 antibody includes a combination of a VH CDR1 sequence, a VH CDR2 sequence, a VH CDR3 sequence, a VL CDR1 sequence, a VL CDR2 sequence, and a VL CDR3 sequence, wherein the VH CDR1 sequence comprises GFTFSGYAMS (SEQ ID NO: 653); the VH CDR2 sequence comprises YISNSGGNAH (SEQ ID NO: 658); and the VH CDR3 sequence comprises EDYGTSPFVY (SEQ ID NO: 664); the VL CDR1 sequence comprises RASESVDSYGISFMN (SEQ ID NO: 675) or RASESVDAYGISFMN (SEQ ID NO:676); the VL CDR2 sequence comprises AASNQGS (SEQ ID NO: 678); and the VL CDR3 sequence comprises QQSKDVPWT (SEQ ID NO: 683). In some embodiments, the anti-PD-1 antibody includes a combination of a VH CDR1 sequence, a VH CDR2 sequence, a VH CDR3 sequence, a VL CDR1 sequence, a VL CDR2 sequence, and a VL CDR3 sequence, wherein the VH CDR1 sequence comprises GFTFSGYAMS (SEQ ID NO: 653); the VH CDR2 sequence comprises YISNSGGNAH (SEQ ID NO: 658); and the VH CDR3 sequence comprises EDYGTSPFVY (SEQ ID NO: 664); the VL CDR1 sequence comprises RASESVDSYGISFMN (SEQ ID NO: 675); the VL CDR2 sequence comprises AASNQGS (SEQ ID NO: 678); and the VL CDR3 sequence comprises QQSKDVPWT (SEQ ID NO: 683). In some embodiments, the anti-PD-1 antibody includes a combination of a VH CDR1 sequence, a VH CDR2 sequence, a VH CDR3 sequence, a VL CDR1 sequence, a VL CDR2 sequence, and a VL CDR3 sequence, wherein the VH CDR1 sequence comprises GFTFSGYAMS (SEQ ID NO: 653); the VH CDR2 sequence comprises YISNSGGNAH (SEQ ID NO: 658); and the VH CDR3 sequence comprises EDYGTSPFVY (SEQ ID NO: 664); the VL CDR1 sequence comprises RASESVDAYGISFMN (SEQ ID NO:676); the VL CDR2 sequence comprises AASNQGS (SEQ ID NO: 678); and the VL CDR3 sequence comprises QQSKDVPWT (SEQ ID NO: 683).

[0025] In some embodiments, the anti-PD-1 antibody includes a heavy chain that comprises or is derived from the amino acid sequence of SEQ ID NO: 1346, and a light chain that comprises or is derived from the amino acid sequence of SEQ ID NO: 626.

[0026] In some embodiments, the anti-PD-1 antibody includes a heavy chain that comprises or is derived from the amino acid sequence of SEQ ID NO: 1514, and a light chain that comprises or is derived from the amino acid sequence of SEQ ID NO: 638.

[0027] In some embodiments, the anti-PD-1 antibody includes the combination of the complementarity determining region (CDR) sequences of the heavy chain amino acid sequence of SEQ ID NO: 1346. In some embodiments, the anti-PD-1 antibody includes the combination of the CDR sequences of the light chain amino acid sequence of SEQ ID NO: 626. In some embodiments, the anti-PD-1 antibody includes a combination of the CDR sequences of the heavy chain amino acid sequence of SEQ ID NO: 1346, and the CDR sequences of the light chain amino acid sequence of SEQ ID NO: 626.

[0028] In some embodiments, the anti-PD-1 antibody includes a combination of a variable heavy chain complementarity determining region 1 (VH CDR1, also referred to herein as CDRH1) sequence, a variable heavy chain complementarity determining region 2 (VH CDR2, also referred to herein as CDRH2) sequence, and a variable heavy chain complementarity determining region 3 (VH CDR3, also referred to herein as CDRH3) sequence, wherein the VH CDR1 sequence comprises GITFSNSG (SEQ ID NO: 1705); the VH CDR2 sequence comprises IWYDGSKR (SEQ ID NO: 1706); and the VH CDR3 sequence comprises TNDDY (SEQ ID NO: 1707).

[0029] In some embodiments, the anti-PD-1 antibody includes a combination of a variable light chain complementarity determining region 1 (VL CDR1, also referred to herein as CDRL1) sequence, a variable light chain complementarity determining region 2 (VL CDR2, also referred to herein as CDRL2) sequence, and a variable light chain complementarity determining region 3 (VL CDR3, also referred to herein as CDRL3) sequence, wherein the VL CDR1 sequence comprises QSVSSY (SEQ ID NO: 1708); the VL CDR2 sequence comprises DAS (SEQ ID NO: 1709); and the VL CDR3 sequence comprises QQSSNWPRT (SEQ ID NO: 1710).

[0030] In some embodiments, the anti-PD-1 antibody includes a combination of a VH CDR1 sequence, a VH CDR2 sequence, a VH CDR3 sequence, a VL CDR1 sequence, a VL CDR2 sequence, and a VL CDR3 sequence, wherein the VH CDR1 sequence comprises GITFSNSG (SEQ ID NO: 1705); the VH CDR2 sequence comprises IWYDGSKR (SEQ ID NO: 1706); the VH CDR3 sequence comprises TNDDY (SEQ ID NO: 1707); the VL CDR1 sequence comprises QSVSSY (SEQ ID NO: 1708); the VL CDR2 sequence comprises DAS (SEQ ID NO: 1709); and the VL CDR3 sequence comprises QQSSNWPRT (SEQ ID NO: 1710).

[0031] In some embodiments, the anti-PD-1 antibody includes the combination of the complementarity determining region (CDR) sequences of the heavy chain amino acid sequence of SEQ ID NO: 1514. In some embodiments, the anti-PD-1 antibody includes the combination of the CDR sequences of the light chain amino acid sequence of SEQ ID NO: 638. In some embodiments, the anti-PD-1 antibody includes a combination of the CDR sequences of the heavy chain amino acid sequence of SEQ ID NO: 1514, and the CDR sequences of the light chain amino acid sequence of SEQ ID NO: 638.

[0032] In some embodiments, the anti-PD-1 antibody includes a combination of a variable heavy chain complementarity determining region 1 (VH CDR1, also referred to herein as CDRH1) sequence, a variable heavy chain complementarity determining region 2 (VH CDR2, also referred to herein as CDRH2) sequence, and a variable heavy chain complementarity determining region 3 (VH CDR3, also referred to herein as CDRH3) sequence, wherein the VH CDR1 sequence comprises GYTFTNYY (SEQ ID NO: 1711); the VH CDR2 sequence comprises INPSNGGT (SEQ ID NO: 1712); and the VH CDR3 sequence comprises RRDYRFDMGFDY (SEQ ID NO: 1713).

[0033] In some embodiments, the anti-PD-1 antibody includes a combination of a variable light chain complementarity determining region 1 (VL CDR1, also referred to herein as CDRL1) sequence, a variable light chain complementarity determining region 2 (VL CDR2, also referred to herein as CDRL2) sequence, and a variable light chain complementarity determining region 3 (VL CDR3, also referred to herein as CDRL3) sequence, wherein the VL CDR1 sequence comprises KGVSTSGYSY (SEQ ID NO: 1714); the VL CDR2 sequence comprises LAS (SEQ ID NO: 1715); and the VL CDR3 sequence comprises QHSRDLPLT (SEQ ID NO: 1716).

[0034] In some embodiments, the anti-PD-1 antibody includes a combination of a VH CDR1 sequence, a VH CDR2 sequence, a VH CDR3 sequence, a VL CDR1 sequence, a VL CDR2 sequence, and a VL CDR3 sequence, wherein the VH CDR1 sequence comprises GYTFTNYY (SEQ ID NO: 1711); the VH CDR2 sequence comprises INPSNGGT (SEQ ID NO: 1712); the VH CDR3 sequence comprises RRDYRFDMGFDY (SEQ ID NO: 1713); the VL CDR1 sequence comprises KGVSTSGYSY (SEQ ID NO: 1714); the VL CDR2 sequence comprises LAS (SEQ ID NO: 1715); and the VL CDR3 sequence comprises QHSRDLPLT (SEQ ID NO: 1716).

[0035] In some embodiments, the antibody comprises a heavy chain amino acid sequence that is at least 90%, 91%, 92%, 93%, 94%, 95%, 96%, 97%, 98% or 99% identical to an amino acid sequence selected from the group consisting of SEQ ID NO: 1, 5, 9, 13, 17, 21, 23, 25, 27, 29, 31, 33, 35, and 37. In some embodiments, the antibody comprises a light chain amino acid that is at least 90%, 91%, 92%, 93%, 94%, 95%, 96%, 97%, 98% or 99% identical to an amino acid sequence selected from the group consisting of SEQ ID NO: 3, 7, 11, 15, 19, 39, 41, 43, 45, 47, 49, 51, 53, 55, 57, and 59. In some embodiments, the antibody comprises a heavy chain amino acid sequence that is at least 90%, 91%, 92%, 93%, 94%, 95%, 96%, 97%, 98% or 99% identical to an amino acid sequence selected from the group consisting of SEQ ID NO: 1, 5, 9, 13, 17, 21, 23, 25, 27, 29, 31, 33, 35, and 37, and a light chain amino acid that is at least 90%, 91%, 92%, 93%, 94%, 95%, 96%, 97%, 98% or 99% identical to an amino acid sequence selected from the group consisting of SEQ ID NO: 3, 7, 11, 15, 19, 39, 41, 43, 45, 47, 49, 51, 53, 55, 57, and 59.

[0036] In some embodiments, the antibody comprises a heavy chain amino acid sequence that is at least 90%, 91%, 92%, 93%, 94%, 95%, 96%, 97%, 98% or 99% identical to an amino acid sequence selected from the group consisting of SEQ ID NO: 21, 23, 25, 27, 29, 31, 33, 35, and 37. In some embodiments, the antibody comprises a light chain amino acid that is at least 90%, 91%, 92%, 93%, 94%, 95%, 96%, 97%, 98% or 99% identical to an amino acid sequence selected from the group consisting of SEQ ID NO: 39, 41, 43, 45, 47, 49, 51, 53, 55, 57, and 59. In some embodiments, the antibody comprises a heavy chain amino acid sequence that is at least 90%, 91%, 92%, 93%, 94%, 95%, 96%, 97%, 98% or 99% identical to an amino acid sequence selected from the group consisting of SEQ ID NO: 21, 23, 25, 27, 29, 31, 33, 35, and 37, and a light chain amino acid that is at least 90%, 91%, 92%, 93%, 94%, 95%, 96%, 97%, 98% or 99% identical to an amino acid sequence selected from the group consisting of SEQ ID NO: 39, 41, 43, 45, 47, 49, 51, 53, 55, 57, and 59. In some embodiments, the anti-PD-1 antibody includes a heavy chain sequence that is at least 90%, 91%, 92%, 93%, 94%, 95%, 96%, 97%, 98% or 99% identical to the amino acid sequence of SEQ ID NO: 21, and a light chain sequence that is at least 90%, 91%, 92%, 93%, 94%, 95%, 96%, 97%, 98% or 99% identical to the amino acid sequence of SEQ ID NO: 45 or SEQ ID NO: 47. In some embodiments, the anti-PD-1 antibody includes a heavy chain sequence that is at least 90%, 91%, 92%, 93%, 94%, 95%, 96%, 97%, 98% or 99% identical to the amino acid sequence of SEQ ID NO: 21, and a light chain sequence that is at least 90%, 91%, 92%, 93%, 94%, 95%, 96%, 97%, 98% or 99% identical to the amino acid sequence of SEQ ID NO: 45. In some embodiments, the anti-PD-1 antibody includes a heavy chain sequence that is at least 90%, 91%, 92%, 93%, 94%, 95%, 96%, 97%, 98% or 99% identical to the amino acid sequence of SEQ ID NO: 21, and a light chain sequence that is at least 90%, 91%, 92%, 93%, 94%, 95%, 96%, 97%, 98% or 99% identical to the amino acid sequence of SEQ ID NO: 47.

[0037] In some embodiments, the anti-PD-1 antibody includes a heavy chain amino acid sequence that is at least 90%, 91%, 92%, 93%, 94%, 95%, 96%, 97%, 98% or 99% identical to the amino acid sequence of SEQ ID NO: 1346, and a light chain amino acid sequence that is at least 90%, 91%, 92%, 93%, 94%, 95%, 96%, 97%, 98% or 99% identical to the amino acid sequence of SEQ ID NO: 626.

[0038] In some embodiments, the anti-PD-1 antibody includes a heavy chain amino acid sequence that is at least 90%, 91%, 92%, 93%, 94%, 95%, 96%, 97%, 98% or 99% identical to the amino acid sequence of SEQ ID NO: 1514, and a light chain amino acid sequence that is at least 90%, 91%, 92%, 93%, 94%, 95%, 96%, 97%, 98% or 99% identical to the amino acid sequence of SEQ ID NO: 638.

[0039] In some embodiments, the antibody comprises a combination of a variable heavy chain complementarity determining region 1 (VH CDR1, also referred to herein as CDRH1) sequence, a variable heavy chain complementarity determining region 2 (VH CDR2, also referred to herein as CDRH2) sequence, a variable heavy chain complementarity determining region 3 (VH CDR3, also referred to herein as CDRH3) sequence, a variable light chain complementarity determining region 1 (VL CDR1, also referred to herein as CDRL1) sequence, a variable light chain complementarity determining region 2 (VL CDR2, also referred to herein as CDRL2) sequence, and a variable light chain complementarity determining region 3 (VL CDR3, also referred to herein as CDRL3) sequence, wherein at least one CDR sequence is selected from the group consisting of a VH CDR1 sequence shown in Table 8; a VH CDR2 sequence shown in Table 8; a VH CDR3 sequence shown in Table 8; a VL CDR1 sequence shown in Table 8; a VL CDR2 sequence shown in Table 8; and a VL CDR3 sequence shown in Table 8.

[0040] In some embodiments, the antibody comprises a combination of a VH CDR1 sequence, a VH CDR2 sequence, a VH CDR3 sequence, a VL CDR1 sequence, a VL CDR2 sequence, and a VL CDR3 sequence, wherein at least one CDR sequence is selected from the group consisting of a VH CDR1 sequence that includes a sequence that is at least 90%, 91%, 92%, 93%, 94%, 95%, 96%, 97%, 98%, 99% or more identical to a VH CDR1 sequence shown in Table 8; a VH CD2 sequence that includes a sequence that is at least 90%, 91%, 92%, 93%, 94%, 95%, 96%, 97%, 98%, 99% or more identical to a VH CDR2 sequence shown in Table 8; a VH CDR3 sequence that includes a sequence that is at least 90%, 91%, 92%, 93%, 94%, 95%, 96%, 97%, 98%, 99% or more identical to a VH CDR3 sequence shown in Table 8; a VL CDR1 sequence that includes a sequence that is at least 90%, 91%, 92%, 93%, 94%, 95%, 96%, 97%, 98%, 99% or more identical to a VL CDR1 sequence shown in Table 8; a VL CDR2 sequence that includes a sequence that is at least 90%, 91%, 92%, 93%, 94%, 95%, 96%, 97%, 98%, 99% or more identical to a VL CDR2 sequence shown in Table 8; and a VL CDR3 sequence that includes a sequence that is at least 90%, 91%, 92%, 93%, 94%, 95%, 96%, 97%, 98%, 99% or more identical to a VL CDR3 sequence shown in Table 8.

[0041] In some embodiments, the antibody comprises a heavy chain that comprises a combination of a VH CDR1 sequence, a VH CDR2 sequence, and a VH CDR3 sequence, wherein the combination is a combination of the three heavy chain CDR sequences (VH CDR1, VH CDR2, VH CDR3) shown in a single row in Table 8.

[0042] In some embodiments, the antibody comprises a light chain that comprises a combination of a VL CDR1 sequence, a VL CDR2 sequence, and a VL CDR3 sequence, wherein the combination is a combination of the three light chain CDR sequences (VL CDR1, VL CDR2, VL CDR3) shown in a single row in Table 8.

[0043] In some embodiments, the antibody comprises a combination of a VH CDR1 sequence, a VH CDR2 sequence, a VH CDR3 sequence shown in a single row in Table 8, and a VL CDR1 sequence, a VL CDR2 sequence, and a VL CDR3 sequence shown in a single row in Table 8.

[0044] In some embodiments, the antibody comprises a combination of a VH CDR1 sequence, a VH CDR2 sequence, a VH CDR3 sequence shown in a single row in Table 8, and a VL CDR1 sequence, a VL CDR2 sequence, and a VL CDR3 sequence shown in a single row in Table 8, wherein each CDR sequence in the combination comprises a sequence that is at least 90%, 91%, 92%, 93%, 94%, 95%, 96%, 97%, 98%, 99% or more identical to the corresponding VH CDR sequence shown in a single row in Table 8 and the corresponding VL CDR shown in a single row in Table 8.

[0045] In some embodiments, the antibody comprises a heavy chain that comprises a combination of a VH CDR1 sequence, a VH CDR2 sequence, and a VH CDR3 sequence, wherein each CDR sequence in the combination comprises a sequence that is at least 90%, 91%, 92%, 93%, 94%, 95%, 96%, 97%, 98%, 99% or more identical to the corresponding CDR sequence in a combination of three heavy chain CDR sequences (VH CDR1, VH CDR2, VH CDR3) shown in a single row in Table 8.

[0046] In some embodiments, the antibody comprises a light chain that comprises a combination of a VL CDR1 sequence, a VL CDR2 sequence, and a VL CDR3 sequence, wherein each CDR sequence in the combination comprises a sequence that is at least 90%, 91%, 92%, 93%, 94%, 95%, 96%, 97%, 98%, 99% or more identical to the corresponding CDR sequence in a combination of three light chain CDR sequences (VL CDR1, VL CDR2, VL CDR3) shown in a single row in Table 8.

[0047] In some embodiments, the antibody includes a combination of a VH CDR1 sequence, a VH CDR2 sequence, and a VH CDR3 sequence, wherein the VH CDR1 sequence comprises a sequence that is at least 90%, 91%, 92%, 93%, 94%, 95%, 96%, 97%, 98%, 99% or more identical to GITFSNSG (SEQ ID NO: 1705); the VH CDR2 sequence comprises a sequence that is at least 90%, 91%, 92%, 93%, 94%, 95%, 96%, 97%, 98%, 99% or more identical to IWYDGSKR (SEQ ID NO: 1706); and the VH CDR3 sequence comprises a sequence that is at least 90%, 91%, 92%, 93%, 94%, 95%, 96%, 97%, 98%, 99% or more identical to TNDDY (SEQ ID NO: 1707).

[0048] In some embodiments, the anti-PD-1 antibody includes a combination of a VL CDR1 sequence, a VL CDR2 sequence, and a VL CDR3 sequence, wherein the VL CDR1 sequence comprises a sequence that is at least 90%, 91%, 92%, 93%, 94%, 95%, 96%, 97%, 98%, 99% or more identical to QSVSSY (SEQ ID NO: 1708); the VL CDR2 sequence comprises a sequence that is at least 90%, 91%, 92%, 93%, 94%, 95%, 96%, 97%, 98%, 99% or more identical to DAS (SEQ ID NO: 1709); and the VL CDR3 sequence comprises a sequence that is at least 90%, 91%, 92%, 93%, 94%, 95%, 96%, 97%, 98%, 99% or more identical to QQSSNWPRT (SEQ ID NO: 1710).

[0049] In some embodiments, the anti-PD-1 antibody includes a combination of a VH CDR1 sequence, a VH CDR2 sequence, a VH CDR3 sequence, a VL CDR1 sequence, a VL CDR2 sequence, and a VL CDR3 sequence, wherein the VH CDR1 sequence comprises a sequence that is at least 90%, 91%, 92%, 93%, 94%, 95%, 96%, 97%, 98%, 99% or more identical to GITFSNSG (SEQ ID NO: 1705); the VH CDR2 sequence comprises a sequence that is at least 90%, 91%, 92%, 93%, 94%, 95%, 96%, 97%, 98%, 99% or more identical to IWYDGSKR (SEQ ID NO: 1706); the VH CDR3 sequence comprises a sequence that is at least 90%, 91%, 92%, 93%, 94%, 95%, 96%, 97%, 98%, 99% or more identical to TNDDY (SEQ ID NO: 1707); the VL CDR1 sequence comprises a sequence that is at least 90%, 91%, 92%, 93%, 94%, 95%, 96%, 97%, 98%, 99% or more identical to QSVSSY (SEQ ID NO: 1708); the VL CDR2 sequence comprises a sequence that is at least 90%, 91%, 92%, 93%, 94%, 95%, 96%, 97%, 98%, 99% or more identical to DAS (SEQ ID NO: 1709); and the VL CDR3 sequence comprises a sequence that is at least 90%, 91%, 92%, 93%, 94%, 95%, 96%, 97%, 98%, 99% or more identical to QQSSNWPRT (SEQ ID NO: 1710).

[0050] In some embodiments, the antibody includes a combination of a VH CDR1 sequence, a VH CDR2 sequence, and a VH CDR3 sequence, wherein the VH CDR1 sequence comprises a sequence that is at least 90%, 91%, 92%, 93%, 94%, 95%, 96%, 97%, 98%, 99% or more identical to GYTFTNYY (SEQ ID NO: 1711); the VH CDR2 sequence comprises a sequence that is at least 90%, 91%, 92%, 93%, 94%, 95%, 96%, 97%, 98%, 99% or more identical to INPSNGGT (SEQ ID NO: 1712); and the VH CDR3 sequence comprises a sequence that is at least 90%, 91%, 92%, 93%, 94%, 95%, 96%, 97%, 98%, 99% or more identical to RRDYRFDMGFDY (SEQ ID NO: 1713).

[0051] In some embodiments, the anti-PD-1 antibody includes a combination of a VL CDR1 sequence, a VL CDR2 sequence, and a VL CDR3 sequence, wherein the VL CDR1 sequence comprises a sequence that is at least 90%, 91%, 92%, 93%, 94%, 95%, 96%, 97%, 98%, 99% or more identical to KGVSTSGYSY (SEQ ID NO: 1714); the VL CDR2 sequence comprises a sequence that is at least 90%, 91%, 92%, 93%, 94%, 95%, 96%, 97%, 98%, 99% or more identical to LAS (SEQ ID NO: 1715); and the VL CDR3 sequence comprises a sequence that is at least 90%, 91%, 92%, 93%, 94%, 95%, 96%, 97%, 98%, 99% or more identical to QHSRDLPLT (SEQ ID NO: 1716).

[0052] In some embodiments, the anti-PD-1 antibody includes a combination of a VH CDR1 sequence, a VH CDR2 sequence, a VH CDR3 sequence, a VL CDR1 sequence, a VL CDR2 sequence, and a VL CDR3 sequence, wherein the VH CDR1 sequence comprises a sequence that is at least 90%, 91%, 92%, 93%, 94%, 95%, 96%, 97%, 98%, 99% or more identical to GYTFTNYY (SEQ ID NO: 1711); the VH CDR2 sequence comprises a sequence that is at least 90%, 91%, 92%, 93%, 94%, 95%, 96%, 97%, 98%, 99% or more identical to INPSNGGT (SEQ ID NO: 1712); the VH CDR3 sequence comprises a sequence that is at least 90%, 91%, 92%, 93%, 94%, 95%, 96%, 97%, 98%, 99% or more identical to RRDYRFDMGFDY (SEQ ID NO: 1713); the VL CDR1 sequence comprises a sequence that is at least 90%, 91%, 92%, 93%, 94%, 95%, 96%, 97%, 98%, 99% or more identical to KGVSTSGYSY (SEQ ID NO: 1714); the VL CDR2 sequence comprises a sequence that is at least 90%, 91%, 92%, 93%, 94%, 95%, 96%, 97%, 98%, 99% or more identical to LAS (SEQ ID NO: 1715); and the VL CDR3 sequence comprises a sequence that is at least 90%, 91%, 92%, 93%, 94%, 95%, 96%, 97%, 98%, 99% or more identical to QHSRDLPLT (SEQ ID NO: 1716).

[0053] In some embodiments, the antibody is encoded by a nucleic acid sequence that comprises a nucleic acid sequence encoding a heavy chain amino acid sequence selected from the group consisting of SEQ ID NO: 1, 5, 9, 13, 17, 21, 23, 25, 27, 29, 31, 33, 35, and 37. In some embodiments, the antibody is encoded by a nucleic acid sequence that comprises a nucleic acid sequence encoding a heavy chain amino acid sequence selected from the group consisting of SEQ ID NO: 21, 23, 25, 27, 29, 31, 33, 35, and 37.

[0054] In some embodiments, the antibody is encoded by a nucleic acid sequence that comprises a nucleic acid sequence encoding a light chain amino acid sequence selected from the group consisting of SEQ ID NO: 3, 7, 11, 15, 19, 39, 41, 43, 45, 47, 49, 51, 53, 55, 57, and 59. In some embodiments, the antibody is encoded by a nucleic acid sequence that comprises a nucleic acid sequence encoding a light chain amino acid sequence selected from the group consisting of SEQ ID NO: 39, 41, 43, 45, 47, 49, 51, 53, 55, 57, and 59.

[0055] In some embodiments, the antibody is encoded by a nucleic acid sequence that comprises a nucleic acid sequence encoding a heavy chain amino acid sequence selected from the group consisting of SEQ ID NO: 1, 5, 9, 13, 17, 21, 23, 25, 27, 29, 31, 33, 35, and 37, and a nucleic acid sequence that comprises a nucleic acid sequence encoding a light chain amino acid sequence selected from the group consisting of SEQ ID NO: 3, 7, 11, 15, 19, 39, 41, 43, 45, 47, 49, 51, 53, 55, 57, and 59.

[0056] In some embodiments, the antibody is encoded by a nucleic acid sequence that comprises a nucleic acid sequence encoding a heavy chain amino acid sequence selected from the group consisting of SEQ ID NO: 21, 23, 25, 27, 29, 31, 33, 35, and 37, and a nucleic acid sequence that comprises a nucleic acid sequence encoding a light chain amino acid sequence selected from the group consisting of SEQ ID NO: 39, 41, 43, 45, 47, 49, 51, 53, 55, 57, and 59.

[0057] In some embodiments, the anti-PD-1 is encoded by a nucleic acid sequence that comprises a nucleic acid sequence encoding a heavy chain that comprises or is derived from the amino acid sequence of SEQ ID NO: 1346, and a nucleic acid sequence that comprises a nucleic acid sequence encoding a light chain that comprises or is derived from the amino acid sequence of SEQ ID NO: 626.

[0058] In some embodiments, the anti-PD-1 antibody is encoded by a nucleic acid sequence that comprises a nucleic acid sequence encoding a heavy chain that comprises or is derived from the amino acid sequence of SEQ ID NO: 1514, and a nucleic acid sequence that comprises a nucleic acid sequence encoding a light chain that comprises or is derived from the amino acid sequence of SEQ ID NO: 638.

[0059] In some embodiments, the antibody is encoded by a nucleic acid sequence that comprises a nucleic acid sequence encoding a heavy chain amino acid sequence that is at least 90%, 91%, 92%, 93%, 94%, 95%, 96%, 97%, 98% or 99% identical to an amino acid sequence selected from the group consisting of SEQ ID NO: 1, 5, 9, 13, 17, 21, 23, 25, 27, 29, 31, 33, 35, and 37. In some embodiments, the antibody is encoded by a nucleic acid sequence that comprises a nucleic acid sequence encoding a heavy chain amino acid sequence that is at least 90%, 91%, 92%, 93%, 94%, 95%, 96%, 97%, 98% or 99% identical to an amino acid sequence selected from the group consisting of SEQ ID NO: 21, 23, 25, 27, 29, 31, 33, 35, and 37.

[0060] In some embodiments, the antibody is encoded by a nucleic acid sequence that comprises a nucleic acid sequence encoding a light chain amino acid that is at least 90%, 91%, 92%, 93%, 94%, 95%, 96%, 97%, 98% or 99% identical to the amino acid sequence selected from the group consisting of SEQ ID NO: 3, 7, 11, 15, 19, 39, 41, 43, 45, 47, 49, Si, 53, 55, 57, and 59. In some embodiments, the antibody is encoded by a nucleic acid sequence that comprises a nucleic acid sequence encoding a light chain amino acid that is at least 90%, 91%, 92%, 93%, 94%, 95%, 96%, 97%, 98% or 99% identical to the amino acid sequence selected from the group consisting of SEQ ID NO: 39, 41, 43, 45, 47, 49, Si, 53, 55, 57, and 59.

[0061] In some embodiments, the antibody is encoded by a nucleic acid sequence that comprises a nucleic acid sequence encoding a heavy chain amino acid sequence that is at least 90%, 91%, 92%, 93%, 94%, 95%, 96%, 97%, 98% or 99% identical to an amino acid sequence selected from the group consisting of SEQ ID NO: 1, 5, 9, 13, 17, 21, 23, 25, 27, 29, 31, 33, 35, and 37, and a nucleic acid sequence encoding a light chain amino acid that is at least 90%, 91%, 92%, 93%, 94%, 95%, 96%, 97%, 98% or 99% identical to the amino acid sequence selected from the group consisting of SEQ ID NO: 3, 7, 11, 15, 19, 39, 41, 43, 45, 47, 49, Si, 53, 55, 57, and 59.

[0062] In some embodiments, the antibody is encoded by a nucleic acid sequence that comprises a nucleic acid sequence encoding a heavy chain amino acid sequence that is at least 90%, 91%, 92%, 93%, 94%, 95%, 96%, 97%, 98% or 99% identical to an amino acid sequence selected from the group consisting of SEQ ID NO: 21, 23, 25, 27, 29, 31, 33, 35, and 37, and a nucleic acid sequence that comprises a nucleic acid sequence encoding a light chain amino acid that is at least 90%, 91%, 92%, 93%, 94%, 95%, 96%, 97%, 98% or 99% identical to the amino acid sequence selected from the group consisting of SEQ ID NO: 39, 41, 43, 45, 47, 49, 51, 53, 55, 57, and 59.

[0063] In some embodiments, the anti-PD-1 is encoded by a nucleic acid sequence that comprises a nucleic acid sequence encoding a heavy chain that is at least 90%, 91%, 92%, 93%, 94%, 95%, 96%, 97%, 98% or 99% identical to the amino acid sequence of SEQ ID NO: 1346, and a nucleic acid sequence that comprises a nucleic acid sequence encoding a light chain t that is at least 90%, 91%, 92%, 93%, 94%, 95%, 96%, 97%, 98% or 99% identical to the amino acid sequence of SEQ ID NO: 626.

[0064] In some embodiments, the anti-PD-1 antibody is encoded by a nucleic acid sequence that comprises a nucleic acid sequence encoding a heavy chain that is at least 90%, 91%, 92%, 93%, 94%, 95%, 96%, 97%, 98% or 99% identical to the amino acid sequence of SEQ ID NO: 1514, and a nucleic acid sequence that comprises a nucleic acid sequence encoding a light chain that is at least 90%, 91%, 92%, 93%, 94%, 95%, 96%, 97%, 98% or 99% identical to the amino acid sequence of SEQ ID NO: 638.

[0065] In some embodiments, the antibody is encoded by a heavy chain nucleic acid sequence selected from the group consisting of SEQ ID NO: 2, 6, 10, 14, 18, 22, 24, 26, 28, 30, 32, 34, 36, and 38. In some embodiments, the antibody is encoded by a heavy chain nucleic acid sequence selected from the group consisting of SEQ ID NO: 22, 24, 26, 28, 30, 32, 34, 36, and 38.

[0066] In some embodiments, the antibody is encoded by a light chain nucleic acid sequence selected from the group consisting of SEQ ID NO: 4, 8, 12, 16, 20, 40, 42, 44, 46, 48, 50, 52, 54, 56, 58, and 60. In some embodiments, the antibody is encoded by a light chain nucleic acid sequence selected from the group consisting of SEQ ID NO: 40, 42, 44, 46, 48, 50, 52, 54, 56, 58, and 60.

[0067] In some embodiments, the antibody is encoded by heavy chain nucleic acid sequence selected from the group consisting of SEQ ID NO: selected from the group consisting of SEQ ID NO: 2, 6, 10, 14, 18, 22, 24, 26, 28, 30, 32, 34, 36, and 38, and a light chain nucleic acid sequence selected from the group consisting of SEQ ID NO: 4, 8, 12, 16, 20, 40, 42, 44, 46, 48, 50, 52, 54, 56, 58, and 60. In some embodiments, the antibody is encoded by heavy chain nucleic acid sequence selected from the group consisting of SEQ ID NO: selected from the group consisting of SEQ ID NO: 22, 24, 26, 28, 30, 32, 34, 36, and 38, and a light chain nucleic acid sequence selected from the group consisting of SEQ ID NO: 40, 42, 44, 46, 48, 50, 52, 54, 56, 58, and 60.

[0068] In some embodiments, the antibody is encoded by a nucleic acid sequence that is at least 90%, 91%, 92%, 93%, 94%, 95%, 96%, 97%, 98% or 99% identical to a heavy chain nucleic acid sequence selected from the group consisting of SEQ ID NO: 2, 6, 10, 14, 18, 22, 24, 26, 28, 30, 32, 34, 36, and 38. In some embodiments, the antibody is encoded by a nucleic acid sequence that is at least 90%, 91%, 92%, 93%, 94%, 95%, 96%, 97%, 98% or 99% identical to a heavy chain nucleic acid sequence selected from the group consisting of SEQ ID NO: 22, 24, 26, 28, 30, 32, 34, 36, and 38.

[0069] In some embodiments, the antibody is encoded by a nucleic acid sequence that is at least 90%, 91%, 92%, 93%, 94%, 95%, 96%, 97%, 98% or 99% identical to a light chain nucleic acid sequence selected from the group consisting of SEQ ID NO: 4, 8, 12, 16, 20, 40, 42, 44, 46, 48, 50, 52, 54, 56, 58, and 60. In some embodiments, the antibody is encoded by a nucleic acid sequence that is at least 90%, 91%, 92%, 93%, 94%, 95%, 96%, 97%, 98% or 99% identical to a light chain nucleic acid sequence selected from the group consisting of SEQ ID NO: 40, 42, 44, 46, 48, 50, 52, 54, 56, 58, and 60.

[0070] In some embodiments, the antibody is encoded by a nucleic acid sequence that is at least 90%, 91%, 92%, 93%, 94%, 95%, 96%, 97%, 98% or 99% identical to a heavy chain nucleic acid sequence selected from the group consisting of SEQ ID NO: 2, 6, 10, 14, 18, 22, 24, 26, 28, 30, 32, 34, 36, and 38, and a nucleic acid sequence that is at least 90%, 91%, 92%, 93%, 94%, 95%, 96%, 97%, 98% or 99% identical to a light chain nucleic acid sequence selected from the group consisting of SEQ ID NO: 4, 8, 12, 16, 20, 40, 42, 44, 46, 48, 50, 52, 54, 56, 58, and 60. In some embodiments, the antibody is encoded by a nucleic acid sequence that is at least 90%, 91%, 92%, 93%, 94%, 95%, 96%, 97%, 98% or 99% identical to a heavy chain nucleic acid sequence selected from the group consisting of SEQ ID NO: 22, 24, 26, 28, 30, 32, 34, 36, and 38, and a nucleic acid sequence that is at least 90%, 91%, 92%, 93%, 94%, 95%, 96%, 97%, 98% or 99% identical to a light chain nucleic acid sequence selected from the group consisting of SEQ ID NO: 40, 42, 44, 46, 48, 50, 52, 54, 56, 58, and 60.

[0071] In some embodiments, the antibody or antigen-binding fragment thereof is incorporated in a multispecific antibody or antigen-binding fragment thereof, where at least one arm of the multispecific antibody specifically binds PD-1. In some embodiments, the antibody or antigen-binding fragment thereof is incorporated in a bispecific antibody or antigen-binding fragment thereof, where at least one arm of the bispecific antibody specifically binds PD-1.

[0072] In some embodiments, at least one arm of the multispecific antibody, e.g., a bispecific antibody, comprises a heavy chain amino acid sequence selected from the group consisting of SEQ ID NO: 1, 5, 9, 13, 17, 21, 23, 25, 27, 29, 31, 33, 35, and 37. In some embodiments, at least one arm of the multispecific antibody, e.g., a bispecific antibody, comprises a heavy chain amino acid sequence selected from the group consisting of SEQ ID NO: 21, 23, 25, 27, 29, 31, 33, 35, and 37.

[0073] In some embodiments, at least one arm of the multispecific antibody, e.g., a bispecific antibody, comprises a light chain amino acid sequence selected from the group consisting of SEQ ID NO: 3, 7, 11, 15, 19, 39, 41, 43, 45, 47, 49, Si, 53, 55, 57, and 59. In some embodiments, at least one arm of the multispecific antibody, e.g., a bispecific antibody, comprises a light chain amino acid sequence selected from the group consisting of SEQ ID NO: 39, 41, 43, 45, 47, 49, Si, 53, 55, 57, and 59.

[0074] In some embodiments, at least one arm of the multispecific antibody, e.g., a bispecific antibody, includes a heavy chain amino acid sequence comprising an amino acid sequence selected from the group consisting of SEQ ID NO: 1, 5, 9, 13, 17, 21, 23, 25, 27, 29, 31, 33, 35, and 37, and a light chain amino acid sequence selected from the group consisting of SEQ ID NO: 3, 7, 11, 15, 19, 39, 41, 43, 45, 47, 49, Si, 53, 55, 57, and 59. In some embodiments, at least one arm of the multispecific antibody, e.g., a bispecific antibody, includes a heavy chain amino acid sequence comprising an amino acid sequence selected from the group consisting of SEQ ID NO: 21, 23, 25, 27, 29, 31, 33, 35, and 37, and a light chain amino acid sequence selected from the group consisting of SEQ ID NO: 39, 41, 43, 45, 47, 49, Si, 53, 55, 57, and 59.

[0075] In some embodiments, at least one arm of the multispecific antibody, e.g., a bispecific antibody, includes a heavy chain that comprises or is derived from amino acid sequence SEQ ID NO: 21. In some embodiments, at least one arm of the multispecific antibody, e.g., a bispecific antibody, includes a light chain that comprises or is derived from amino acid sequence SEQ ID NO: 45 or SEQ ID NO: 47. In some embodiments, at least one arm of the multispecific antibody, e.g., a bispecific antibody, includes a heavy chain that comprises or is derived from amino acid sequence SEQ ID NO: 21 and a light chain that comprises or is derived from amino acid sequence SEQ ID NO: 45 or SEQ ID NO: 47. In some embodiments, at least one arm of the multispecific antibody, e.g., a bispecific antibody, includes a heavy chain that comprises or is derived from amino acid sequence SEQ ID NO: 21 and a light chain that comprises or is derived from amino acid sequence SEQ ID NO: 45. In some embodiments, at least one arm of the multispecific antibody, e.g., a bispecific antibody, includes a heavy chain that comprises or is derived from amino acid sequence SEQ ID NO: 21 and a light chain that comprises or is derived from amino acid sequence SEQ ID NO: 47.

[0076] In some embodiments, at least one arm of the multispecific antibody, e.g., a bispecific antibody, includes the combination of the complementarity determining region (CDR) sequences of the heavy chain amino acid sequence of SEQ ID NO: 21. In some embodiments, at least one arm of the multispecific antibody, e.g., a bispecific antibody, includes the combination of the CDR sequences of the light chain amino acid sequence of SEQ ID NO: 45 or of SEQ ID NO: 47. In some embodiments, at least one arm of the multispecific antibody, e.g., a bispecific antibody, includes a combination of the CDR sequences of the heavy chain amino acid sequence of SEQ ID NO: 21, and the CDR sequences of the light chain amino acid sequence of SEQ ID NO: 45 or 47. In some embodiments, at least one arm of the multispecific antibody, e.g., a bispecific antibody, includes a combination of the CDR sequences of the heavy chain amino acid sequence of SEQ ID NO: 21, and the CDR sequences of the light chain amino acid sequence of SEQ ID NO: 45. In some embodiments, at least one arm of the multispecific antibody, e.g., a bispecific antibody, includes a combination of the CDR sequences of the heavy chain amino acid sequence of SEQ ID NO: 21, and the CDR sequences of the light chain amino acid sequence of SEQ ID NO: 47.

[0077] In some embodiments, at least one arm of the multispecific antibody, e.g., a bispecific antibody includes: (a) a variable heavy chain complementarity determining region 1 (VH CDR1) comprising an amino acid sequence selected from the group consisting of SEQ ID NOs: 653-657; (b) a variable heavy chain complementarity determining region 2 (VH CDR2) comprising an amino acid sequence selected from the group consisting of SEQ ID NOs: 658-663; (c) a variable heavy chain complementarity determining region 3 (VH CDR3) comprising an amino acid sequence selected from the group consisting of SEQ ID NOs: 664-668; (d) a variable light chain complementarity determining region 1 (VL CDR1) comprising an amino acid sequence selected from the group consisting of SEQ ID NOs:669-677; (e) a variable light chain complementarity determining region 2 (VL CDR2) comprising an amino acid sequence selected from the group consisting of SEQ ID NOs: 678-682; and (f) variable light chain complementarity determining region 3 (VL CDR3) comprising an amino acid sequence selected from the group consisting of SEQ ID NOs: 683-687

[0078] In some embodiments, at least one arm of the multispecific antibody, e.g., a bispecific antibody, includes a combination of a variable heavy chain complementarity determining region 1 (VH CDR1, also referred to herein as CDRH1) sequence, a variable heavy chain complementarity determining region 2 (VH CDR2, also referred to herein as CDRH2) sequence, and a variable heavy chain complementarity determining region 3 (VH CDR3, also referred to herein as CDRH3) sequence, wherein the VH CDR1 sequence comprises GFTFSGYAMS (SEQ ID NO: 653); the VH CDR2 sequence comprises YISNSGGNAH (SEQ ID NO: 658); and the VH CDR3 sequence comprises EDYGTSPFVY (SEQ ID NO: 664).

[0079] In some embodiments, at least one arm of the multispecific antibody, e.g., a bispecific antibody, includes a combination of a variable light chain complementarity determining region 1 (VL CDR1, also referred to herein as CDRL1) sequence, a variable light chain complementarity determining region 2 (VL CDR2, also referred to herein as CDRL2) sequence, and a variable light chain complementarity determining region 3 (VL CDR3, also referred to herein as CDRL3) sequence, wherein the VL CDR1 sequence comprises RASESVDSYGISFMN (SEQ ID NO: 675) or RASESVDAYGISFMN (SEQ ID NO:676); the VL CDR2 sequence comprises AASNQGS (SEQ ID NO: 678); and the VL CDR3 sequence comprises QQSKDVPWT (SEQ ID NO: 683). In some embodiments, at least one arm of the multispecific antibody, e.g., a bispecific antibody, includes a combination of a VL CDR1 sequence, a VL CDR2 sequence, and a VL CDR3 sequence, wherein the VL CDR1 sequence comprises RASESVDSYGISFMN (SEQ ID NO: 675); the VL CDR2 sequence comprises AASNQGS (SEQ ID NO: 678); and the VL CDR3 sequence comprises QQSKDVPWT (SEQ ID NO: 683). In some embodiments, at least one arm of the multispecific antibody, e.g., a bispecific antibody, includes a combination of a VL CDR1 sequence, a VL CDR2 sequence, and a VL CDR3 sequence, wherein the VL CDR1 sequence comprises RASESVDAYGISFMN (SEQ ID NO:676); the VL CDR2 sequence comprises AASNQGS (SEQ ID NO: 678); and the VL CDR3 sequence comprises QQSKDVPWT (SEQ ID NO: 683).

[0080] In some embodiments, at least one arm of the multispecific antibody, e.g., a bispecific antibody, includes a combination of a VH CDR1 sequence, a VH CDR2 sequence, a VH CDR3 sequence, a VL CDR1 sequence, a VL CDR2 sequence, and a VL CDR3 sequence, wherein the VH CDR1 sequence comprises GFTFSGYAMS (SEQ ID NO: 653); the VH CDR2 sequence comprises YISNSGGNAH (SEQ ID NO: 658); and the VH CDR3 sequence comprises EDYGTSPFVY (SEQ ID NO: 664); the VL CDR1 sequence comprises RASESVDSYGISFMN (SEQ ID NO: 675) or RASESVDAYGISFMN (SEQ ID NO:676); the VL CDR2 sequence comprises AASNQGS (SEQ ID NO: 678); and the VL CDR3 sequence comprises QQSKDVPWT (SEQ ID NO: 683). In some embodiments, at least one arm of the multispecific antibody, e.g., a bispecific antibody, includes a combination of a VH CDR1 sequence, a VH CDR2 sequence, a VH CDR3 sequence, a VL CDR1 sequence, a VL CDR2 sequence, and a VL CDR3 sequence, wherein the VH CDR1 sequence comprises GFTFSGYAMS (SEQ ID NO: 653); the VH CDR2 sequence comprises YISNSGGNAH (SEQ ID NO: 658); and the VH CDR3 sequence comprises EDYGTSPFVY (SEQ ID NO: 664); the VL CDR1 sequence comprises RASESVDSYGISFMN (SEQ ID NO: 675); the VL CDR2 sequence comprises AASNQGS (SEQ ID NO: 678); and the VL CDR3 sequence comprises QQSKDVPWT (SEQ ID NO: 683). In some embodiments, at least one arm of the multispecific antibody, e.g., a bispecific antibody, includes a combination of a VH CDR1 sequence, a VH CDR2 sequence, a VH CDR3 sequence, a VL CDR1 sequence, a VL CDR2 sequence, and a VL CDR3 sequence, wherein the VH CDR1 sequence comprises GFTFSGYAMS (SEQ ID NO: 653); the VH CDR2 sequence comprises YISNSGGNAH (SEQ ID NO: 658); and the VH CDR3 sequence comprises EDYGTSPFVY (SEQ ID NO: 664); the VL CDR1 sequence comprises RASESVDAYGISFMN (SEQ ID NO:676); the VL CDR2 sequence comprises AASNQGS (SEQ ID NO: 678); and the VL CDR3 sequence comprises QQSKDVPWT (SEQ ID NO: 683).

[0081] In some embodiments, at least one arm of the multispecific antibody, e.g., a bispecific antibody, includes a heavy chain that comprises or is derived from the amino acid sequence of SEQ ID NO: 1346, and a light chain that comprises or is derived from the amino acid sequence of SEQ ID NO: 626.

[0082] In some embodiments, at least one arm of the multispecific antibody, e.g., a bispecific antibody, includes a heavy chain that comprises or is derived from the amino acid sequence of SEQ ID NO: 1514, and a light chain that comprises or is derived from the amino acid sequence of SEQ ID NO: 638.

[0083] In some embodiments, at least one arm of the multispecific antibody, e.g., a bispecific antibody, includes the combination of the complementarity determining region (CDR) sequences of the heavy chain amino acid sequence of SEQ ID NO: 1346. In some embodiments, at least one arm of the multispecific antibody, e.g., a bispecific antibody, includes the combination of the CDR sequences of the light chain amino acid sequence of SEQ ID NO: 626. In some embodiments, at least one arm of the multispecific antibody, e.g., a bispecific antibody, includes a combination of the CDR sequences of the heavy chain amino acid sequence of SEQ ID NO: 1346, and the CDR sequences of the light chain amino acid sequence of SEQ ID NO: 626.

[0084] In some embodiments, at least one arm of the multispecific antibody, e.g., a bispecific antibody, includes a combination of a variable heavy chain complementarity determining region 1 (VH CDR1, also referred to herein as CDRH1) sequence, a variable heavy chain complementarity determining region 2 (VH CDR2, also referred to herein as CDRH2) sequence, and a variable heavy chain complementarity determining region 3 (VH CDR3, also referred to herein as CDRH3) sequence, wherein the VH CDR1 sequence comprises GITFSNSG (SEQ ID NO: 1705); the VH CDR2 sequence comprises IWYDGSKR (SEQ ID NO: 1706); and the VH CDR3 sequence comprises TNDDY (SEQ ID NO: 1707).

[0085] In some embodiments, at least one arm of the multispecific antibody, e.g., a bispecific antibody, includes a combination of a variable light chain complementarity determining region 1 (VL CDR1, also referred to herein as CDRL1) sequence, a variable light chain complementarity determining region 2 (VL CDR2, also referred to herein as CDRL2) sequence, and a variable light chain complementarity determining region 3 (VL CDR3, also referred to herein as CDRL3) sequence, wherein the VL CDR1 sequence comprises QSVSSY (SEQ ID NO: 1708); the VL CDR2 sequence comprises DAS (SEQ ID NO: 1709); and the VL CDR3 sequence comprises QQSSNWPRT (SEQ ID NO: 1710).

[0086] In some embodiments, at least one arm of the multispecific antibody, e.g., a bispecific antibody, includes a combination of a VH CDR1 sequence, a VH CDR2 sequence, a VH CDR3 sequence, a VL CDR1 sequence, a VL CDR2 sequence, and a VL CDR3 sequence, wherein the VH CDR1 sequence comprises GITFSNSG (SEQ ID NO: 1705); the VH CDR2 sequence comprises IWYDGSKR (SEQ ID NO: 1706); the VH CDR3 sequence comprises TNDDY (SEQ ID NO: 1707); the VL CDR1 sequence comprises QSVSSY (SEQ ID NO: 1708); the VL CDR2 sequence comprises DAS (SEQ ID NO: 1709); and the VL CDR3 sequence comprises QQSSNWPRT (SEQ ID NO: 1710).

[0087] In some embodiments, at least one arm of the multispecific antibody, e.g., a bispecific antibody, includes the combination of the complementarity determining region (CDR) sequences of the heavy chain amino acid sequence of SEQ ID NO: 1514. In some embodiments, at least one arm of the multispecific antibody, e.g., a bispecific antibody, includes the combination of the CDR sequences of the light chain amino acid sequence of SEQ ID NO: 638. In some embodiments, at least one arm of the multispecific antibody, e.g., a bispecific antibody, includes a combination of the CDR sequences of the heavy chain amino acid sequence of SEQ ID NO: 1514, and the CDR sequences of the light chain amino acid sequence of SEQ ID NO: 638.

[0088] In some embodiments, at least one arm of the multispecific antibody, e.g., a bispecific antibody, includes a combination of a variable heavy chain complementarity determining region 1 (VH CDR1, also referred to herein as CDRH1) sequence, a variable heavy chain complementarity determining region 2 (VH CDR2, also referred to herein as CDRH2) sequence, and a variable heavy chain complementarity determining region 3 (VH CDR3, also referred to herein as CDRH3) sequence, wherein the VH CDR1 sequence comprises GYTFTNYY (SEQ ID NO: 1711); the VH CDR2 sequence comprises INPSNGGT (SEQ ID NO: 1712); and the VH CDR3 sequence comprises RRDYRFDMGFDY (SEQ ID NO: 1713).

[0089] In some embodiments, at least one arm of the multispecific antibody, e.g., a bispecific antibody, includes a combination of a variable light chain complementarity determining region 1 (VL CDR1, also referred to herein as CDRL1) sequence, a variable light chain complementarity determining region 2 (VL CDR2, also referred to herein as CDRL2) sequence, and a variable light chain complementarity determining region 3 (VL CDR3, also referred to herein as CDRL3) sequence, wherein the VL CDR1 sequence comprises KGVSTSGYSY (SEQ ID NO: 1714); the VL CDR2 sequence comprises LAS (SEQ ID NO: 1715); and the VL CDR3 sequence comprises QHSRDLPLT (SEQ ID NO: 1716).

[0090] In some embodiments, at least one arm of the multispecific antibody, e.g., a bispecific antibody, includes a combination of a VH CDR1 sequence, a VH CDR2 sequence, a VH CDR3 sequence, a VL CDR1 sequence, a VL CDR2 sequence, and a VL CDR3 sequence, wherein the VH CDR1 sequence comprises GYTFTNYY (SEQ ID NO: 1711); the VH CDR2 sequence comprises INPSNGGT (SEQ ID NO: 1712); the VH CDR3 sequence comprises RRDYRFDMGFDY (SEQ ID NO: 1713); the VL CDR1 sequence comprises KGVSTSGYSY (SEQ ID NO: 1714); the VL CDR2 sequence comprises LAS (SEQ ID NO: 1715); and the VL CDR3 sequence comprises QHSRDLPLT (SEQ ID NO: 1716).

[0091] In some embodiments, at least one arm of the multispecific antibody, e.g., a bispecific antibody, comprises a heavy chain amino acid sequence that is at least 90%, 91%, 92%, 93%, 94%, 95%, 96%, 97%, 98% or 99% identical to an amino acid sequence selected from the group consisting of SEQ ID NO: 1, 5, 9, 13, 17, 21, 23, 25, 27, 29, 31, 33, 35, and 37. In some embodiments, at least one arm of the multispecific antibody, e.g., a bispecific antibody, comprises a heavy chain amino acid sequence that is at least 90%, 91%, 92%, 93%, 94%, 95%, 96%, 97%, 98% or 99% identical to an amino acid sequence selected from the group consisting of SEQ ID NO: 21, 23, 25, 27, 29, 31, 33, 35, and 37.

[0092] In some embodiments, at least one arm of the multispecific antibody, e.g., a bispecific antibody, comprises a light chain amino acid that is at least 90%, 91%, 92%, 93%, 94%, 95%, 96%, 97%, 98% or 99% identical to an amino acid sequence selected from the group consisting of SEQ ID NO: 3, 7, 11, 15, 19, 39, 41, 43, 45, 47, 49, 51, 53, 55, 57, and 59. In some embodiments, at least one arm of the multispecific antibody, e.g., a bispecific antibody, comprises a light chain amino acid that is at least 90%, 91%, 92%, 93%, 94%, 95%, 96%, 97%, 98% or 99% identical to an amino acid sequence selected from the group consisting of SEQ ID NO: 39, 41, 43, 45, 47, 49, 51, 53, 55, 57, and 59.

[0093] In some embodiments, at least one arm of the multispecific antibody, e.g., a bispecific antibody, comprises a heavy chain amino acid sequence that is at least 90%, 91%, 92%, 93%, 94%, 95%, 96%, 97%, 98% or 99% identical to an amino acid sequence selected from the group consisting of SEQ ID NO: 1, 5, 9, 13, 17, 21, 23, 25, 27, 29, 31, 33, 35, and 37, and a light chain amino acid that is at least 90%, 91%, 92%, 93%, 94%, 95%, 96%, 97%, 98% or 99% identical to an amino acid sequence selected from the group consisting of SEQ ID NO: 3, 7, 11, 15, 19, 39, 41, 43, 45, 47, 49, 51, 53, 55, 57, and 59.

[0094] In some embodiments, at least one arm of the multispecific antibody, e.g., a bispecific antibody, includes a heavy chain amino acid sequence that is at least 90%, 91%, 92%, 93%, 94%, 95%, 96%, 97%, 98% or 99% identical to the amino acid sequence of SEQ ID NO: 1346, and a light chain amino acid that is at least 90%, 91%, 92%, 93%, 94%, 95%, 96%, 97%, 98% or 99% identical to the amino acid sequence of SEQ ID NO: 626.

[0095] In some embodiments, at least one arm of the multispecific antibody, e.g., a bispecific antibody, includes a heavy chain amino acid sequence that is at least 90%, 91%, 92%, 93%, 94%, 95%, 96%, 97%, 98% or 99% identical to the amino acid sequence of SEQ ID NO: 1514, and a light chain amino acid that is at least 90%, 91%, 92%, 93%, 94%, 95%, 96%, 97%, 98% or 99% identical to the amino acid sequence of SEQ ID NO: 638.

[0096] In some embodiments, at least one arm of the multispecific antibody, e.g., a bispecific antibody, includes a combination of a VH CDR1 sequence, a VH CDR2 sequence, and a VH CDR3 sequence, wherein the VH CDR1 sequence comprises a sequence that is at least 90%, 91%, 92%, 93%, 94%, 95%, 96%, 97%, 98%, 99% or more identical to GITFSNSG (SEQ ID NO: 1705); the VH CDR2 sequence comprises a sequence that is at least 90%, 91%, 92%, 93%, 94%, 95%, 96%, 97%, 98%, 99% or more identical to IWYDGSKR (SEQ ID NO: 1706); and the VH CDR3 sequence comprises a sequence that is at least 90%, 91%, 92%, 93%, 94%, 95%, 96%, 97%, 98%, 99% or more identical to TNDDY (SEQ ID NO: 1707).

[0097] In some embodiments, at least one arm of the multispecific antibody, e.g., a bispecific antibody, includes a combination of a VL CDR1 sequence, a VL CDR2 sequence, and a VL CDR3 sequence, wherein the VL CDR1 sequence comprises a sequence that is at least 90%, 91%, 92%, 93%, 94%, 95%, 96%, 97%, 98%, 99% or more identical to QSVSSY (SEQ ID NO: 1708); the VL CDR2 sequence comprises a sequence that is at least 90%, 91%, 92%, 93%, 94%, 95%, 96%, 97%, 98%, 99% or more identical to DAS (SEQ ID NO: 1709); and the VL CDR3 sequence comprises a sequence that is at least 90%, 91%, 92%, 93%, 94%, 95%, 96%, 97%, 98%, 99% or more identical to QQSSNWPRT (SEQ ID NO: 1710).

[0098] In some embodiments, at least one arm of the multispecific antibody, e.g., a bispecific antibody, includes a combination of a VH CDR1 sequence, a VH CDR2 sequence, a VH CDR3 sequence, a VL CDR1 sequence, a VL CDR2 sequence, and a VL CDR3 sequence, wherein the VH CDR1 sequence comprises a sequence that is at least 90%, 91%, 92%, 93%, 94%, 95%, 96%, 97%, 98%, 99% or more identical to GITFSNSG (SEQ ID NO: 1705); the VH CDR2 sequence comprises a sequence that is at least 90%, 91%, 92%, 93%, 94%, 95%, 96%, 97%, 98%, 99% or more identical to IWYDGSKR (SEQ ID NO: 1706); the VH CDR3 sequence comprises a sequence that is at least 90%, 91%, 92%, 93%, 94%, 95%, 96%, 97%, 98%, 99% or more identical to TNDDY (SEQ ID NO: 1707); the VL CDR1 sequence comprises a sequence that is at least 90%, 91%, 92%, 93%, 94%, 95%, 96%, 97%, 98%, 99% or more identical to QSVSSY (SEQ ID NO: 1708); the VL CDR2 sequence comprises a sequence that is at least 90%, 91%, 92%, 93%, 94%, 95%, 96%, 97%, 98%, 99% or more identical to DAS (SEQ ID NO: 1709); and the VL CDR3 sequence comprises a sequence that is at least 90%, 91%, 92%, 93%, 94%, 95%, 96%, 97%, 98%, 99% or more identical to QQSSNWPRT (SEQ ID NO: 1710).

[0099] In some embodiments, at least one arm of the multispecific antibody, e.g., a bispecific antibody, includes a combination of a VH CDR1 sequence, a VH CDR2 sequence, and a VH CDR3 sequence, wherein the VH CDR1 sequence comprises a sequence that is at least 90%, 91%, 92%, 93%, 94%, 95%, 96%, 97%, 98%, 99% or more identical to GYTFTNYY (SEQ ID NO: 1711); the VH CDR2 sequence comprises a sequence that is at least 90%, 91%, 92%, 93%, 94%, 95%, 96%, 97%, 98%, 99% or more identical to INPSNGGT (SEQ ID NO: 1712); and the VH CDR3 sequence comprises a sequence that is at least 90%, 91%, 92%, 93%, 94%, 95%, 96%, 97%, 98%, 99% or more identical to RRDYRFDMGFDY (SEQ ID NO: 1713).

[0100] In some embodiments, at least one arm of the multispecific antibody, e.g., a bispecific antibody, includes a combination of a VL CDR1 sequence, a VL CDR2 sequence, and a VL CDR3 sequence, wherein the VL CDR1 sequence comprises a sequence that is at least 90%, 91%, 92%, 93%, 94%, 95%, 96%, 97%, 98%, 99% or more identical to KGVSTSGYSY (SEQ ID NO: 1714); the VL CDR2 sequence comprises a sequence that is at least 90%, 91%, 92%, 93%, 94%, 95%, 96%, 97%, 98%, 99% or more identical to LAS (SEQ ID NO: 1715); and the VL CDR3 sequence comprises a sequence that is at least 90%, 91%, 92%, 93%, 94%0, 95%, 96%, 97%, 98%, 99% or more identical to QHSRDLPLT (SEQ ID NO: 1716).

[0101] In some embodiments, at least one arm of the multispecific antibody, e.g., a bispecific antibody, includes a combination of a VH CDR1 sequence, a VH CDR2 sequence, a VH CDR3 sequence, a VL CDR1 sequence, a VL CDR2 sequence, and a VL CDR3 sequence, wherein the VH CDR1 sequence comprises a sequence that is at least 90%, 91%, 92%, 93%, 94%, 95%, 96%, 97%, 98%, 99% or more identical to GYTFTNYY (SEQ ID NO: 1711); the VH CDR2 sequence comprises a sequence that is at least 90%, 91%, 92%, 93%, 94%, 95%, 96%, 97%, 98%, 99% or more identical to INPSNGGT (SEQ ID NO: 1712); the VH CDR3 sequence comprises a sequence that is at least 90%, 91%, 92%, 93%, 94%, 95%, 96%, 97%, 98%, 99% or more identical to RRDYRFDMGFDY (SEQ ID NO: 1713); the VL CDR1 sequence comprises a sequence that is at least 90%, 91%, 92%, 93%, 94%, 95%, 96%, 97%, 98%, 99% or more identical to KGVSTSGYSY (SEQ ID NO: 1714); the VL CDR2 sequence comprises a sequence that is at least 90%, 91%, 92%, 93%, 94%, 95%, 96%, 97%, 98%, 99% or more identical to LAS (SEQ ID NO: 1715); and the VL CDR3 sequence comprises a sequence that is at least 90%, 91%, 92%, 93%, 94%, 95%, 96%, 97%, 98%, 99% or more identical to QHSRDLPLT (SEQ ID NO: 1716).

[0102] In some embodiments, at least one arm of the multispecific antibody, e.g., a bispecific antibody, comprises a combination of a variable heavy chain complementarity determining region 1 (VH CDR1, also referred to herein as CDRH1) sequence, a variable heavy chain complementarity determining region 2 (VH CDR2, also referred to herein as CDRH2) sequence, a variable heavy chain complementarity determining region 3 (VH CDR3, also referred to herein as CDRH3) sequence, a variable light chain complementarity determining region 1 (VL CDR1, also referred to herein as CDRL1) sequence, a variable light chain complementarity determining region 2 (VL CDR2, also referred to herein as CDRL2) sequence, and a variable light chain complementarity determining region 3 (VL CDR3, also referred to herein as CDRL3) sequence, wherein at least one CDR sequence is selected from the group consisting of a VH CDR1 sequence shown in Table 8; a VH CDR2 sequence shown in Table 8; a VH CDR3 sequence shown in Table 8; a VL CDR1 sequence shown in Table 8; a VL CDR2 sequence shown in Table 8; and a VL CDR3 sequence shown in Table 8.

[0103] In some embodiments, at least one arm of the multispecific antibody, e.g., a bispecific antibody, comprises a combination of a VH CDR1 sequence, a VH CDR2 sequence, a VH CDR3 sequence, a VL CDR1 sequence, a VL CDR2 sequence, and a VL CDR3 sequence, wherein at least one CDR sequence is selected from the group consisting of a VH CDR1 sequence that includes a sequence that is at least 90%, 91%, 92%, 93%, 94%, 95%, 96%, 97%, 98%, 99% or more identical to a VH CDR1 sequence shown in Table 8; a VH CD2 sequence that includes a sequence that is at least 90%, 91%, 92%, 93%, 94%, 95%, 96%, 97%, 98%, 99% or more identical to a VH CDR2 sequence shown in Table 8; a VH CDR3 sequence that includes a sequence that is at least 90%, 91%, 92%, 93%, 94%, 95%, 96%, 97%, 98%, 99% or more identical to a VH CDR3 sequence shown in Table 8; a VL CDR1 sequence that includes a sequence that is at least 90%, 91%, 92%, 93%, 94%, 95%, 96%, 97%, 98%, 99% or more identical to a VL CDR1 sequence shown in Table 8; a VL CDR2 sequence that includes a sequence that is at least 90%, 91%, 92%, 93%, 94%, 95%, 96%, 97%, 98%, 99% or more identical to a VL CDR2 sequence shown in Table 8; and a VL CDR3 sequence that includes a sequence that is at least 90%, 91%, 92%, 93%, 94%, 95%, 96%, 97%, 98%, 99% or more identical to a VL CDR3 sequence shown in Table 8.

[0104] In some embodiments, at least one arm of the multispecific antibody, e.g., a bispecific antibody, comprises a combination of a VH CDR1 sequence, a VH CDR2 sequence, a VH CDR3 sequence, a VL CDR1 sequence, a VL CDR2 sequence, and a VL CDR3 sequence, wherein the combination is a combination of the six CDR sequences (VH CDR1, VH CDR2, VH CDR3, VL CDR1, VL CDR2, and VL CDR3) shown in a single row in Table 8.

[0105] In some embodiments, at least one arm of the multispecific antibody, e.g., a bispecific antibody, comprises a heavy chain that comprises a combination of a VH CDR1 sequence, a VH CDR2 sequence, and a VH CDR3 sequence, wherein the combination is a combination of the three heavy chain CDR sequences (VH CDR1, VH CDR2, VH CDR3) shown in a single row in Table 8.

[0106] In some embodiments, at least one arm of the multispecific antibody, e.g., a bispecific antibody, comprises a combination of a VH CDR1 sequence, a VH CDR2 sequence, a VH CDR3 sequence shown in a single row in Table 8, a VL CDR1 sequence, a VL CDR2 sequence, and a VL CDR3 sequence shown in a single row in Table 8, wherein each CDR sequence in the combination comprises a sequence that is at least 90%, 91%, 92%, 93%, 94%, 95%, 96%, 97%, 98%, 99% or more identical to the corresponding VH CDR sequence shown in a single row in Table 8 and the corresponding VL CDR shown in a single row in Table 8.

[0107] In some embodiments, at least one arm of the multispecific antibody, e.g., a bispecific antibody, comprises a heavy chain that comprises a combination of a VH CDR1 sequence, a VH CDR2 sequence, and a VH CDR3 sequence, wherein each CDR sequence in the combination comprises a sequence that is at least 90%, 91%, 92%, 93%, 94%, 95%, 96%, 97%, 98%, 99% or more identical to the corresponding CDR sequence in a combination of three heavy chain CDR sequences (VH CDR1, VH CDR2, VH CDR3) shown in a single row in Table 8.

[0108] The disclosure also provides activatable antibodies that include an antibody or antigen-binding fragment thereof that specifically binds PD-1 coupled to a masking moiety (MM), such that coupling of the MM reduces the ability of the antibody or antigen-binding fragment thereof to bind PD-1. In some embodiments, the MM is coupled via a cleavable moiety (CM) that includes sequence that functions as a substrate for a protease. The activatable anti-PD-1 antibodies of the disclosure are activated when the cleavable moiety is cleaved by a protease. For example, the protease is produced by a tumor that is in proximity to T cells that express PD-1. In some embodiments, the protease is produced by a tumor that is co-localized with T cells that express PD-1.

[0109] The activatable anti-PD-1 antibodies provided herein, also referred to herein as anti-PD-1 activatable antibodies or PD-1 activatable antibodies, are stable in circulation, activated at intended sites of therapy and/or diagnosis but not in normal, e.g., healthy tissue or other tissue not targeted for treatment and/or diagnosis, and, when activated, exhibit binding to PD-1 that is at least comparable to the corresponding, unmodified antibody.

[0110] The invention also provides methods of treating, preventing and/or delaying the onset or progression of, or alleviating a symptom associated with aberrant expression and/or activity of PD-1 in a subject using antibodies or activatable antibodies that bind PD-1, particularly activatable antibodies that bind and neutralize or otherwise inhibit at least one biological activity of PD-1.

[0111] In some embodiments, the activatable anti-PD-1 antibody comprises an activatable antibody that, in an activated state, specifically binds to mammalian PD-1, wherein said activatable antibody comprises: an antibody or an antigen binding fragment thereof (AB) that specifically binds to mammalian PD-1; a masking moiety (MM) that inhibits the binding of the AB to mammalian PD-1 when the activatable antibody is in an uncleaved state; and a cleavable moiety (CM) coupled to the AB, wherein the CM is a polypeptide that functions as a substrate for a protease.

[0112] In some embodiments, the activatable anti-PD-1 antibody comprises an activatable antibody that, in an activated state, (a) specifically binds to mammalian PD-1; and (b) specifically blocks a natural ligand of PD-1 from binding to the mammalian PD-1, wherein the activatable antibody comprises: an antibody or an antigen binding fragment thereof (AB) that specifically binds to mammalian PD-1; a masking moiety (MM) that inhibits the binding of the AB to mammalian PD-1 when the activatable antibody is in an uncleaved state; and a cleavable moiety (CM) coupled to the AB, wherein the CM is a polypeptide that functions as a substrate for a protease.

[0113] In some embodiments, the activatable antibody in an uncleaved state specifically binds to the mammalian PD-1 with a dissociation constant of 0.5 nM to 1 nM, 0.5 nM to 2 nM, 0.5 nM to 5 nM, 0.5 nM to 10 nM, 0.5 nM to 15 nM, 0.5 nM to 20 nM, 0.5 nM to 25 nM, 0.5 nM to 50 nM, 0.5 nM to 75 nM, 0.5 nM to 100 nM, 0.5 nM to 150 nM, 0.5 nM to 200 nM, 0.5 nM to 300 nM, 0.5 nM to 400 nM, 1 nM to 2 nM, 1 nM to 5 nM, 1 nM to 10 nM, 1 nM to 15 nM, 1 nM to 20 nM, 1 nM to 25 nM, 1 nM to 50 nM, 1 nM to 75 nM, 1 nM to 100 nM, 1 nM to 150 nM, 1 nM to 200 nM, 1 nM to 300 nM, 1 nM to 400 nM, 2 nM to 5 nM, 2 nM to 10 nM, 2 nM to 15 nM, 2 nM to 20 nM, 2 nM to 25 nM, 2 nM to 50 nM, 2 nM to 75 nM, 2 nM to 100 nM, 2 nM to 150 nM, 2 nM to 200 nM, 2 nM to 300 nM, 2 nM to 400 nM, 5 nM to 10 nM, 5 nM to 15 nM, 5 nM to 20 nM, 5 nM to 25 nM, 5 nM to 50 nM, 5 nM to 75 nM, 5 nM to 100 nM, 5 nM to 150 nM, 5 nM to 200 nM, 5 nM to 300 nM, 5 nM to 400 nM, 10 nM to 15 nM, 10 nM to 20 nM, 10 nM to 25 nM, 10 nM to 50 nM, 10 nM to 75 nM, 10 nM to 100 nM, 10 nM to 150 nM, 10 nM to 200 nM, 10 nM to 300 nM, 10 nM to 400 nM, 15 nM to 20 nM, 15 nM to 25 nM, 15 nM to 50 nM, 15 nM to 75 nM, 15 nM to 100 nM, 15 nM to 150 nM, 15 nM to 200 nM, 15 nM to 300 nM, 15 nM to 400 nM, 20 nM to 25 nM, 20 nM to 50 nM, 20 nM to 75 nM, 20 nM to 100 nM, 20 nM to 150 nM, 20 nM to 200 nM, 20 nM to 300 nM, 20 nM to 400 nM, 25 nM to 50 nM, 25 nM to 75 nM, 25 nM to 100 nM, 25 nM to 150 nM, 25 nM to 200 nM, 25 nM to 300 nM, 25 nM to 400 nM, 50 nM to 75 nM, 50 nM to 100 nM, 50 nM to 150 nM, 50 nM to 200 nM, 50 nM to 300 nM, 50 nM to 400 nM, 75 nM to 100 nM, 75 nM to 150 nM, 75 nM to 200 nM, 75 nM to 300 nM, 75 nM to 400 nM, 100 nM to 150 nM, 100 nM to 200 nM, 100 nM to 300 nM, 100 nM to 400 nM, 150 nM to 200 nM, 150 nM to 300 nM, 150 nM to 400 nM, 200 nM to 300 nM, 200 nM to 400 nM, or 300 nM to 400 nM.

[0114] In some embodiments, the activatable antibody in an activated state specifically binds to the mammalian PD-1 with a dissociation constant of 0.01 nM to 5 nM, 0.05 nM to 5 nM, 0.1 nM to 5 nM, 0.2 nM to 5 nM, 0.3 nM to 5 nM, 0.4 nM to 5 nM, 0.5 nM to 5 nM, 0.75 nM to 5 nM, 1 nM to 5 nM, 2 nM to 5 nM, 0.01 nM to 2 nM, 0.05 nM to 2 nM, 0.1 nM to 2 nM, 0.2 nM to 2 nM, 0.3 nM to 2 nM, 0.4 nM to 2 nM, 0.5 nM to 2 nM, 0.75 nM to 1 nM, 1 nM to 2 nM, 0.01 nM to 1 nM, 0.05 nM to 1 nM, 0.1 nM to 1 nM, 0.2 nM to 1 nM, 0.3 nM to 1 nM, 0.4 nM to 1 nM, 0.5 nM to 1 nM, 0.75 nM to 1 nM, 0.01 nM to 0.75 nM, 0.05 nM to 0.75 nM, 0.1 nM to 0.75 nM, 0.2 nM to 0.75 nM, 0.3 nM to 0.75 nM, 0.4 nM to 0.75 nM, 0.5 nM to 0.75 nM, 0.01 nM to 0.5 nM, 0.05 nM to 0.5 nM, 0.1 nM to 0.5 nM, 0.2 nM to 0.5 nM, 0.3 nM to 0.5 nM, 0.4 nM to 0.5 nM, 0.01 nM to 0.4 nM, 0.05 nM to 0.4 nM, 0.1 nM to 0.4 nM, 0.2 nM to 0.4 nM, 0.3 nM to 0.4 nM, 0.01 nM to 0.3 nM, 0.05 nM to 0.3 nM, 0.1 nM to 0.3 nM, 0.2 nM to 0.3 nM, 0.01 nM to 0.2 nM, 0.05 nM to 0.2 nM, 0.1 nM to 0.2 nM, 0.01 nM to 0.1 nM, 0.05 nM to 0.1 nM, or 0.01 nM to 0.05 nM.

[0115] In some embodiments, the activatable antibody comprises an AB that specifically binds to the mammalian PD-1 with a dissociation constant of 0.01 nM to 5 nM, 0.05 nM to 5 nM, 0.1 nM to 5 nM, 0.2 nM to 5 nM, 0.3 nM to 5 nM, 0.4 nM to 5 nM, 0.5 nM to 5 nM, 0.75 nM to 5 nM, 1 nM to 5 nM, 2 nM to 5 nM, 0.01 nM to 2 nM, 0.05 nM to 2 nM, 0.1 nM to 2 nM, 0.2 nM to 2 nM, 0.3 nM to 2 nM, 0.4 nM to 2 nM, 0.5 nM to 2 nM, 0.75 nM to 1 nM, 1 nM to 2 nM, 0.01 nM to 1 nM, 0.05 nM to 1 nM, 0.1 nM to 1 nM, 0.2 nM to 1 nM, 0.3 nM to 1 nM, 0.4 nM to 1 nM, 0.5 nM to 1 nM, 0.75 nM to 1 nM, 0.01 nM to 0.75 nM, 0.05 nM to 0.75 nM, 0.1 nM to 0.75 nM, 0.2 nM to 0.75 nM, 0.3 nM to 0.75 nM, 0.4 nM to 0.75 nM, 0.5 nM to 0.75 nM, 0.01 nM to 0.5 nM, 0.05 nM to 0.5 nM, 0.1 nM to 0.5 nM, 0.2 nM to 0.5 nM, 0.3 nM to 0.5 nM, 0.4 nM to 0.5 nM, 0.01 nM to 0.4 nM, 0.05 nM to 0.4 nM, 0.1 nM to 0.4 nM, 0.2 nM to 0.4 nM, 0.3 nM to 0.4 nM, 0.01 nM to 0.3 nM, 0.05 nM to 0.3 nM, 0.1 nM to 0.3 nM, 0.2 nM to 0.3 nM, 0.01 nM to 0.2 nM, 0.05 nM to 0.2 nM, 0.1 nM to 0.2 nM, 0.01 nM to 0.1 nM, 0.05 nM to 0.1 nM, or 0.01 nM to 0.05 nM.

[0116] In some embodiments, the mammalian PD-1 is selected from the group consisting of a human PD-1 and a cynomolgus monkey PD-1. In some embodiments, the AB specifically binds to human PD-1 or cynomolgus monkey PD-1 with a dissociation constant of less than or equal to 1 nM. In some embodiments, the mammalian PD-1 is a human PD-1. In some embodiments, the AB has one or more of the characteristics selected from the group consisting of: (a) the AB specifically binds human PD-1 and cynomolgus monkey PD-1; (b) the AB inhibits binding of human PDL1 and human PDL2 to human PD-1; and (c) the AB inhibits binding of cynomolgus monkey PDL1 and cynomolgus monkey PDL2 to cynomolgus monkey PD-1.

[0117] In some embodiments, the mammalian PD-1 is mouse PD-1. In some embodiments, the activatable antibody comprises an AB that specifically binds mouse PD-1 or inhibits binding of mouse PDL1 and mouse PDL2 to mouse PD1.

### I

[0118] In some embodiments, the activatable antibody in an uncleaved state specifically binds to the mammalian PD-1 with a dissociation constant greater than or equal to 0.5 nM, greater than or equal to 1 nM, greater than or equal to 2 nM, greater than or equal to 3 nM, greater than or equal to 4 nM, greater than or equal to 5 nM, greater than or equal to 10 nM, greater than or equal to 15 nM, greater than or equal to 20 nM, greater than or equal to 25 nM, greater than or equal to 50 nM, greater than or equal to 75 nM, greater than or equal to 100 nM, greater than or equal to 150 nM, greater than or equal to 200 nM, greater than or equal to 300 nM and/or greater than or equal to 400 nM.

[0119] In some embodiments, the activatable antibody in an activated state specifically binds to the mammalian PD-1 with a dissociation constant less than or equal to 0.01 nM, less than or equal to 0.05 nM, less than or equal to 0.1 nM, less than or equal to 0.2 nM, less than or equal to 0.3 nM, less than or equal to 0.4 nM, less than or equal to 0.5 nM, less than or equal to 0.75 nM, and less than or equal to 1 nM.

[0120] In some embodiments, the activatable antibody comprises an AB that specifically binds to the mammalian PD-1 with a dissociation constant less than or equal to 0.01 nM, less than or equal to 0.05 nM, less than or equal to 0.1 nM, less than or equal to 0.2 nM, less than or equal to 0.3 nM, less than or equal to 0.4 nM, less than or equal to 0.5 nM, less than or equal to 0.75 nM, and less than or equal to 1 nM.

[0121] In some embodiments, the activatable antibody comprises an AB blocks the ability of a natural ligand to bind to the mammalian PDL1 with an EC₅₀ of 0.1 nM to 10 nM, 0.1 nM to 5 nM, 0.1 nM to 3 nM, 0.1 nM to 2 nM, 0.1 nM to 1 nM, 0.1 nM to 0.5 nM, 0.1 nM to 0.25 nM, 0.25 nM to 10 nM, 0.25 nM to 5 nM, 0.25 nM to 3 nM, 0.25 nM to 2 nM, 0.25 nM to 1 nM, 0.25 nM to 0.5 nM, 0.5 nM to 10 nM, 0.5 nM to 5 nM, 0.5 nM to 3 nM, 0.5 nM to 2 nM, 0.5 nM to 1 nM, 1 nM to 10 nM, 1 nM to 5 nM, 1 nM to 3 nM, 1 nM to 2 nM, 2 nM to 10 nM, 2 nM to 5 nM, 2 nM to 3 nM, 3 nM to 10 nM, 3 nM to 5 nM, or 5 nM to 10 nM.

[0122] In some embodiments, the natural ligand is a mammalian PDL1 or a mammalian PDL2. In some embodiments, the natural ligand is selected from the group consisting of: a human PDL1, a human PDL2, a cynomolgus monkey PDL1, and a cynomolgus monkey PDL2.

[0123] In some embodiments, the activatable antibody has one or more of the following characteristics: (a) the AB induces type 1 diabetes in a non-obese diabetic (NOD) mouse; and (b) the activatable antibody in an uncleaved state inhibits the induction of type 1 diabetes in a NOD mouse.

[0124] In some embodiments, the activatable antibody inhibits the induction of type 1 diabetes in the NOD mouse after administration of the activatable antibody at a single dose of 0.5 mg/kg to 15 mg/kg, 1 mg/kg to 15 mg/kg, 2 mg/kg to 15 mg/kg, 3 mg/kg to 15 mg/kg, 5 mg/kg to 15 mg/kg, 10 mg/kg to 15 mg/kg, 0.5 mg/kg to 10 mg/kg, 1 mg/kg to 10 mg/kg, 2 mg/kg to 10 mg/kg, 3 mg/kg to 10 mg/kg, 5 mg/kg to 10 mg/kg, 0.5 mg/kg to 5 mg/kg, 1 mg/kg to 5 mg/kg, 2 mg/kg to 5 mg/kg, 3 mg/kg to 5 mg/kg, 0.5 mg/kg to 3 mg/kg, 1 mg/kg to 3 mg/kg, 2 mg/kg to 3 mg/kg, 0.5 mg/kg to 2 mg/kg, 1 mg/kg to 2 mg/kg, or 0.5 mg/kg to 1 mg/kg. In some embodiments, the activatable antibody inhibits the induction of type 1 diabetes in the NOD mouse after administration of the activatable antibody at a single dose of 3 mg/kg to 10 mg/kg, 3 mg/kg or 10 mg/kg. In some embodiments, the activatable antibody inhibits the induction of type 1 diabetes in the NOD mouse after administration of the activatable antibody at a single dose of 3 mg/kg to 10 mg/kg. In some embodiments, the activatable antibody inhibits the induction of type 1 diabetes in the NOD mouse after administration of the activatable antibody at a single dose of 3 mg/kg. In some embodiments, the activatable antibody inhibits the induction of type 1 diabetes in the NOD mouse after administration of the activatable antibody at a single dose of 10 mg/kg.

[0125] In some embodiments, the AB induces type 1 diabetes in the NOD mouse after administration of the AB at a single dose of 0.5 mg/kg to 15 mg/kg, 1 mg/kg to 15 mg/kg, 2 mg/kg to 15 mg/kg, 3 mg/kg to 15 mg/kg, 5 mg/kg to 15 mg/kg, 10 mg/kg to 15 mg/kg, 0.5 mg/kg to 10 mg/kg, 1 mg/kg to 10 mg/kg, 2 mg/kg to 10 mg/kg, 3 mg/kg to 10 mg/kg, 5 mg/kg to 10 mg/kg, 0.5 mg/kg to 5 mg/kg, 1 mg/kg to 5 mg/kg, 2 mg/kg to 5 mg/kg, 3 mg/kg to 5 mg/kg, 0.5 mg/kg to 3 mg/kg, 1 mg/kg to 3 mg/kg, 2 mg/kg to 3 mg/kg, 0.5 mg/kg to 2 mg/kg, 1 mg/kg to 2 mg/kg, or 0.5 mg/kg to 1 mg/kg. In some embodiments, the AB induces type 1 diabetes in the NOD mouse after administration of the AB at a single dose of 1 mg/kg to 20 mg/kg, 1 mg/kg, 3 mg/kg, 5 mg/kg, 10 mg/kg, or 20 mg/kg. In some embodiments, the AB induces type 1 diabetes in the NOD mouse after administration of the AB at a single dose of 1 mg/kg to 20 mg/kg. In some embodiments, the AB induces type 1 diabetes in the NOD mouse after administration of the AB at a single dose of 1 mg/kg. In some embodiments, the AB induces type 1 diabetes in the NOD mouse after administration of the AB at a single dose of 3 mg/kg. In some embodiments, the AB induces type 1 diabetes in the NOD mouse after administration of the AB at a single dose of 5 mg/kg. In some embodiments, the AB induces type 1 diabetes in the NOD mouse after administration of the AB at a single dose of 10 mg/kg. In some embodiments, the AB induces type 1 diabetes in the NOD mouse after administration of the AB at a single dose of 20 mg/kg.

[0126] In some embodiments, the activatable antibody has one or more of the following characteristics: (a) the activatable antibody in an uncleaved state does not induce type 1 diabetes in greater than 50% of a population of non-obese diabetic (NOD) mice, and (b) the AB induces type 1 diabetes in greater than 50%, greater than 60%, greater than 70%, greater than 80%, between 50% to 100%, between 50% and 75%, or between 70% and 90% of a population of NOD mice.

[0127] In some embodiments, the activatable antibody does not induce type 1 diabetes in greater than 50%, greater than 60%, greater than 70%, greater than 80%, between 50% to 100%, between 50% and 75%, or between 70% and 90% of the population of NOD mice after administration to each mouse in the population a single dose of the activatable antibody at a dosage of: 0.5 mg/kg to 15 mg/kg, 1 mg/kg to 15 mg/kg, 2 mg/kg to 15 mg/kg, 3 mg/kg to 15 mg/kg, 5 mg/kg to 15 mg/kg, 10 mg/kg to 15 mg/kg, 0.5 mg/kg to 10 mg/kg, 1 mg/kg to 10 mg/kg, 2 mg/kg to 10 mg/kg, 3 mg/kg to 10 mg/kg, 5 mg/kg to 10 mg/kg, 0.5 mg/kg to 5 mg/kg, 1 mg/kg to 5 mg/kg, 2 mg/kg to 5 mg/kg, 3 mg/kg to 5 mg/kg, 0.5 mg/kg to 3 mg/kg, 1 mg/kg to 3 mg/kg, 2 mg/kg to 3 mg/kg, 0.5 mg/kg to 2 mg/kg, 1 mg/kg to 2 mg/kg, or 0.5 mg/kg to 1 mg/kg. In some embodiments, the activatable antibody inhibits the induction of type 1 diabetes in the NOD mouse after administration of the activatable antibody at a single dose of 3 mg/kg to 10 mg/kg, 3 mg/kg or 10 mg/kg. In some embodiments the dose is a single dose of 3 mg/kg to 10 mg/kg. In some embodiments the dose is a single dose of 3 mg/kg. In some embodiments the dose is a single dose of 10 mg/kg.

[0128] In some embodiments, the activatable antibody has one or more of the following characteristics: (a) the activatable antibody in an uncleaved state does not induce type 1 diabetes in greater than 50%, greater than 60%, greater than 70%, greater than 80%, between 50% to 100%, between 50% and 75%, or between 70% and 90% of a population of non-obese diabetic (NOD) mice when administered at a single dose of 3 mg/kg; and (b) the AB induces type 1 diabetes in greater than 50%, greater than 60%, greater than 70%, greater than 80%, between 50% to 100%, between 50% and 75%, or between 70% and 90% of a population of NOD mice, when administered at a single dose of 3 mg/kg.

[0129] In some embodiments, the activatable antibody has one or more of the following characteristics: (a) the activatable antibody in an uncleaved state does not induce type 1 diabetes in greater than 50%, greater than 60%, greater than 70%, greater than 80%, between 50% to 100%, between 50% and 75%, or between 70% and 90% of a population of non-obese diabetic (NOD) mice when administered at a single dose of 10 mg/kg; and (b) the AB induces type 1 diabetes in greater than 50%, greater than 60%, greater than 70%, greater than 80%, between 50% to 100%, between 50% and 75%, or between 70% and 90% of a population of NOD mice, when administered at a single dose of 10 mg/kg.

[0130] In some embodiments, the AB induces type 1 diabetes in greater than 50%, greater than 60%, greater than 70%, greater than 80%, between 50% to 100%, between 50% and 75%, or between 70% and 90% of the population of the NOD mice after administration to each mouse in the population a single dose of the AB at a dosage of: 2 mg/kg to 15 mg/kg, 3 mg/kg to 15 mg/kg, 5 mg/kg to 15 mg/kg, 10 mg/kg to 15 mg/kg, 2 mg/kg to 10 mg/kg, 3 mg/kg to 10 mg/kg, 5 mg/kg to 10 mg/kg, 2 mg/kg to 5 mg/kg, 3 mg/kg to 5 mg/kg, or 2 mg/kg to 3 mg/kg. In some embodiments the dose is a single dose of 3 mg/kg to 20 mg/kg, 3 mg/kg, 5 mg/kg, 10 mg/kg, or 20 mg/kg. In some embodiments the dose is a single dose of 3 mg/kg to 20 mg/kg. In some embodiments the dose is a single dose of 3 mg/kg. In some embodiments the dose is a single dose of 5 mg/kg. In some embodiments the dose is a single dose of 10 mg/kg. In some embodiments the dose is a single dose of 20 mg/kg.

[0131] In some embodiments, the activatable antibody in an uncleaved state does not induce type 1 diabetes in greater than 50% of a population of non-obese diabetic (NOD) mice, wherein the population of NOD mice are concurrently dosed with an anti-CTLA4 antibody.

[0132] In some embodiments, the population of NOD mice are each administered a single dose of the activatable antibody at a dosage of 2 mg/kg to 15 mg/kg, 3 mg/kg to 15 mg/kg, 5 mg/kg to 15 mg/kg, 10 mg/kg to 15 mg/kg, 2 mg/kg to 10 mg/kg, 3 mg/kg to 10 mg/kg, 5 mg/kg to 10 mg/kg, 2 mg/kg to 5 mg/kg, 3 mg/kg to 5 mg/kg, or 2 mg/kg to 3 mg/kg concurrently with a dose of an anti-CTLA4 antibody. In some embodiments, the population of NOD mice are each administered a single dose of the activatable antibody at a dosage of 10 mg/kg concurrently with a dose of an anti-CTLA4 antibody.

[0133] In some embodiments, the population of NOD mice is each administered a single dose of the anti-CTLA4 antibody at a dosage of 2 mg/kg to 15 mg/kg, 3 mg/kg to 15 mg/kg, 5 mg/kg to 15 mg/kg, or 10 mg/kg to 15 mg/kg concurrently with a dose of an anti-PD-1 activatable antibody. In some embodiments, the population of NOD mice is each administered a single dose of the anti-CTLA4 antibody at a dosage of 10 mg/kg concurrently with a dose of an anti-PD-1 activatable antibody.

[0134] In some embodiments, the population of NOD mice is each administered a single dose of the activatable antibody at a dosage of 5 mg/kg to 15 mg/kg and a single dose of the anti-CTLA4 antibody at a dosage of 5 mg/kg to 15 mg/kg. In some embodiments, the population of NOD mice is each administered a single dose of the activatable antibody at a dosage of 10 mg/kg concurrently with a single dose of an anti-CTLA4 antibody at a dosage of 10 mg/kg.

[0135] In some embodiments, the NOD mouse is a female NOD/ShiLtJ mouse substrain. In some embodiments, the population of NOD mice is each 5 weeks old when the activatable antibody is first administered. In some embodiments, the population of NOD mice is each 10 weeks old when the activatable antibody is first administered.

[0136] The activatable antibodies in an activated state bind PD-1 and include (i) an antibody or an antigen binding fragment thereof (AB) that specifically binds to PD-1; (ii) a masking moiety (MM) that, when the activatable antibody is in an uncleaved state, inhibits the binding of the AB to PD-1; and (c) a cleavable moiety (CM) coupled to the AB, wherein the CM is a polypeptide that functions as a substrate for a protease.

[0137] In some embodiments, the activatable antibody in the uncleaved state has the structural arrangement from N-terminus to C-terminus as follows: MM-CM-AB or AB-CM-MM.

[0138] In some embodiments, the activatable antibody comprises a linking peptide between the MM and the CM.

[0139] In some embodiments, the activatable antibody comprises a linking peptide between the CM and the AB.

[0140] In some embodiments, the activatable antibody comprises a first linking peptide (LP1) and a second linking peptide (LP2), and wherein the activatable antibody in the uncleaved state has the structural arrangement from N-terminus to C-terminus as follows: MM-LP1-CM-LP2-AB or AB-LP2-CM-LP1-MM. In some embodiments, the two linking peptides need not be identical to each other. In some embodiments, each of LP1 and LP2 is a peptide of about 1 to 20 amino acids in length.

[0141] In some embodiments, at least one of LP1 or LP2 comprises an amino acid sequence selected from the group consisting of (GS)ₙ, (GGS)ₙ, (GSGGS)ₙ (SEQ ID NO: 363) and (GGGS)ₙ (SEQ ID NO: 364), where n is an integer of at least one.

[0142] In some embodiments, at least one of LP1 or LP2 comprises an amino acid sequence selected from the group consisting of GGSG (SEQ ID NO: 365), GGSGG (SEQ ID NO: 366), GSGSG (SEQ ID NO: 367), GSGGG (SEQ ID NO: 368), GGGSG (SEQ ID NO: 369), and GSSSG (SEQ ID NO: 370).

[0143] In some embodiments, LP1 comprises the amino acid sequence GSSGGSGGSGGSG (SEQ ID NO: 371), GSSGGSGGSGG (SEQ ID NO: 372), GSSGGSGGSGGS (SEQ ID NO: 373), GSSGGSGGSGGSGGGS (SEQ ID NO: 374), GSSGGSGGSG (SEQ ID NO: 375), GSSGGSGGSGS (SEQ ID NO: 376), GGGSSGGS (SEQ ID NO: 65), or GGGSSGG (SEQ ID NO: 1040).

[0144] In some embodiments, LP2 comprises the amino acid sequence GSS, GGS, GGGS (SEQ ID NO: 377), GSSGT (SEQ ID NO: 378) or GSSG (SEQ ID NO: 379).

[0145] In some embodiments, the AB has a dissociation constant (K_{d}) of about 100 nM or less for binding to PD-1.

[0146] In some embodiments, the activatable antibody includes an antibody or antigen-binding fragment thereof (AB) that specifically binds PD-1. In some embodiments, the antibody or antigen-binding fragment thereof that binds PD-1 is a monoclonal antibody, domain antibody, single chain, Fab fragment, a F(ab′)₂ fragment, a scFv, a scAb, a dAb, a single domain heavy chain antibody, or a single domain light chain antibody. In some embodiments, such an antibody or antigen-binding fragment thereof that binds PD-1 is a mouse, other rodent, chimeric, humanized or fully human monoclonal antibody.

[0147] In some embodiments, the activatable antibody comprises a heavy chain amino acid sequence that comprises or is derived from an amino acid sequence selected from the group consisting of SEQ ID NO: 1, 5, 9, 13, 17, 21, 23, 25, 27, 29, 31, 33, 35, and 37. In some embodiments, the activatable antibody comprises a light chain amino acid sequence selected from the group consisting of SEQ ID NO: 3, 7, 11, 15, 19, 39, 41, 43, 45, 47, 49, 51, 53, 55, 57, and 59.

[0148] In some embodiments, the activatable anti-PD-1 antibody includes a heavy chain that comprises or is derived from an amino acid sequence selected from the group consisting of SEQ ID NO: 21, 23, 25, 27, 29, 31, 33, 35, and 37, and a light chain that comprises or is derived from an amino acid sequence selected from the group consisting of SEQ ID NO: 39, 41, 43, 45, 47, 49, Si, 53, 55, 57, and 59.

[0149] In some embodiments, the activatable anti-PD-1 antibody includes a heavy chain that comprises or is derived from amino acid sequence SEQ ID NO: 21. In some embodiments, the activatable anti-PD-1 antibody includes a light chain that comprises or is derived from amino acid sequence SEQ ID NO: 45 or SEQ ID NO: 47. In some embodiments, the activatable anti-PD-1 antibody includes a heavy chain that comprises or is derived from amino acid sequence SEQ ID NO: 21 and a light chain that comprises or is derived from amino acid sequence SEQ ID NO: 45 or SEQ ID NO: 47. In some embodiments, the activatable anti-PD-1 antibody includes a heavy chain that comprises or is derived from amino acid sequence SEQ ID NO: 21 and a light chain that comprises or is derived from amino acid sequence SEQ ID NO: 45. In some embodiments, the activatable anti-PD-1 antibody includes a heavy chain that comprises or is derived from amino acid sequence SEQ ID NO: 21 and a light chain that comprises or is derived from amino acid sequence SEQ ID NO: 47.

[0150] In some embodiments, the activatable anti-PD-1 antibody includes the combination of the complementarity determining region (CDR) sequences of the heavy chain amino acid sequence of SEQ ID NO: 21. In some embodiments, the activatable anti-PD-1 antibody includes the combination of the CDR sequences of the light chain amino acid sequence of SEQ ID NO: 45 or of SEQ ID NO: 47. In some embodiments, the activatable anti-PD-1 antibody includes a combination of the CDR sequences of the heavy chain amino acid sequence of SEQ ID NO: 21, and the CDR sequences of the light chain amino acid sequence of SEQ ID NO: 45 or 47. In some embodiments, the activatable anti-PD-1 antibody includes a combination of the CDR sequences of the heavy chain amino acid sequence of SEQ ID NO: 21, and the CDR sequences of the light chain amino acid sequence of SEQ ID NO: 45. In some embodiments, the activatable anti-PD-1 antibody includes a combination of the CDR sequences of the heavy chain amino acid sequence of SEQ ID NO: 21, and the CDR sequences of the light chain amino acid sequence of SEQ ID NO: 47.

[0151] In some embodiments, the activatable anti-PD-1 antibody includes: (a) a variable heavy chain complementarity determining region 1 (VH CDR1) comprising an amino acid sequence selected from the group consisting of SEQ ID NOs: 653-657; (b) a variable heavy chain complementarity determining region 2 (VH CDR2) comprising an amino acid sequence selected from the group consisting of SEQ ID NOs: 658-663; (c) a variable heavy chain complementarity determining region 3 (VH CDR3) comprising an amino acid sequence selected from the group consisting of SEQ ID NOs: 664-668; (d) a variable light chain complementarity determining region 1 (VL CDR1) comprising an amino acid sequence selected from the group consisting of SEQ ID NOs:669-677; (e) a variable light chain complementarity determining region 2 (VL CDR2) comprising an amino acid sequence selected from the group consisting of SEQ ID NOs: 678-682; and (f) variable light chain complementarity determining region 3 (VL CDR3) comprising an amino acid sequence selected from the group consisting of SEQ ID NOs: 683-687.

[0152] In some embodiments, the activatable anti-PD-1 antibody includes a combination of a variable heavy chain complementarity determining region 1 (VH CDR1, also referred to herein as CDRH1) sequence, a variable heavy chain complementarity determining region 2 (VH CDR2, also referred to herein as CDRH2) sequence, and a variable heavy chain complementarity determining region 3 (VH CDR3, also referred to herein as CDRH3) sequence, wherein the VH CDR1 sequence comprises GFTFSGYAMS (SEQ ID NO: 653); the VH CDR2 sequence comprises YISNSGGNAH (SEQ ID NO: 658); and the VH CDR3 sequence comprises EDYGTSPFVY (SEQ ID NO: 664).

[0153] In some embodiments, the activatable anti-PD-1 antibody includes a combination of a variable light chain complementarity determining region 1 (VL CDR1, also referred to herein as CDRL1) sequence, a variable light chain complementarity determining region 2 (VL CDR2, also referred to herein as CDRL2) sequence, and a variable light chain complementarity determining region 3 (VL CDR3, also referred to herein as CDRL3) sequence, wherein the VL CDR1 sequence comprises RASESVDSYGISFMN (SEQ ID NO: 675) or RASESVDAYGISFMN (SEQ ID NO:676); the VL CDR2 sequence comprises AASNQGS (SEQ ID NO: 678); and the VL CDR3 sequence comprises QQSKDVPWT (SEQ ID NO: 683). In some embodiments, the activatable anti-PD-1 antibody includes a combination of a VL CDR1 sequence, a VL CDR2 sequence, and a VL CDR3 sequence, wherein the VL CDR1 sequence comprises RASESVDSYGISFMN (SEQ ID NO: 675); the VL CDR2 sequence comprises AASNQGS (SEQ ID NO: 678); and the VL CDR3 sequence comprises QQSKDVPWT (SEQ ID NO: 683). In some embodiments, the activatable anti-PD-1 antibody includes a combination of a VL CDR1 sequence, a VL CDR2 sequence, and a VL CDR3 sequence, wherein the VL CDR1 sequence comprises RASESVDAYGISFMN (SEQ ID NO:676); the VL CDR2 sequence comprises AASNQGS (SEQ ID NO: 678); and the VL CDR3 sequence comprises QQSKDVPWT (SEQ ID NO: 683).

[0154] In some embodiments, the activatable anti-PD-1 antibody includes a combination of a VH CDR1 sequence, a VH CDR2 sequence, a VH CDR3 sequence, a VL CDR1 sequence, a VL CDR2 sequence, and a VL CDR3 sequence, wherein the VH CDR1 sequence comprises GFTFSGYAMS (SEQ ID NO: 653); the VH CDR2 sequence comprises YISNSGGNAH (SEQ ID NO: 658); and the VH CDR3 sequence comprises EDYGTSPFVY (SEQ ID NO: 664); the VL CDR1 sequence comprises RASESVDSYGISFMN (SEQ ID NO: 675) or RASESVDAYGISFMN (SEQ ID NO:676); the VL CDR2 sequence comprises AASNQGS (SEQ ID NO: 678); and the VL CDR3 sequence comprises QQSKDVPWT (SEQ ID NO: 683). In some embodiments, the activatable anti-PD-1 antibody includes a combination of a VH CDR1 sequence, a VH CDR2 sequence, a VH CDR3 sequence, a VL CDR1 sequence, a VL CDR2 sequence, and a VL CDR3 sequence, wherein the VH CDR1 sequence comprises GFTFSGYAMS (SEQ ID NO: 653); the VH CDR2 sequence comprises YISNSGGNAH (SEQ ID NO: 658); and the VH CDR3 sequence comprises EDYGTSPFVY (SEQ ID NO: 664); the VL CDR1 sequence comprises RASESVDSYGISFMN (SEQ ID NO: 675); the VL CDR2 sequence comprises AASNQGS (SEQ ID NO: 678); and the VL CDR3 sequence comprises QQSKDVPWT (SEQ ID NO: 683). In some embodiments, the activatable anti-PD-1 antibody includes a combination of a VH CDR1 sequence, a VH CDR2 sequence, a VH CDR3 sequence, a VL CDR1 sequence, a VL CDR2 sequence, and a VL CDR3 sequence, wherein the VH CDR1 sequence comprises GFTFSGYAMS (SEQ ID NO: 653); the VH CDR2 sequence comprises YISNSGGNAH (SEQ ID NO: 658); and the VH CDR3 sequence comprises EDYGTSPFVY (SEQ ID NO: 664); the VL CDR1 sequence comprises RASESVDAYGISFMN (SEQ ID NO:676); the VL CDR2 sequence comprises AASNQGS (SEQ ID NO: 678); and the VL CDR3 sequence comprises QQSKDVPWT (SEQ ID NO: 683).

[0155] In some embodiments, the activatable anti-PD-1 antibody includes a heavy chain that comprises or is derived from the amino acid sequence of SEQ ID NO: 1346, and a light chain that comprises or is derived from the amino acid sequence of SEQ ID NO: 626.

[0156] In some embodiments, the activatable anti-PD-1 antibody includes a heavy chain that comprises or is derived from the amino acid sequence of SEQ ID NO: 1514, and a light chain that comprises or is derived from the amino acid sequence of SEQ ID NO: 638.

[0157] In some embodiments, the activatable anti-PD-1 antibody includes the combination of the complementarity determining region (CDR) sequences of the heavy chain amino acid sequence of SEQ ID NO: 1346. In some embodiments, the activatable anti-PD-1 antibody includes the combination of the CDR sequences of the light chain amino acid sequence of SEQ ID NO: 626. In some embodiments, the activatable anti-PD-1 antibody includes a combination of the CDR sequences of the heavy chain amino acid sequence of SEQ ID NO: 1346, and the CDR sequences of the light chain amino acid sequence of SEQ ID NO: 626.

[0158] In some embodiments, the activatable anti-PD-1 antibody includes a combination of a variable heavy chain complementarity determining region 1 (VH CDR1, also referred to herein as CDRH1) sequence, a variable heavy chain complementarity determining region 2 (VH CDR2, also referred to herein as CDRH2) sequence, and a variable heavy chain complementarity determining region 3 (VH CDR3, also referred to herein as CDRH3) sequence, wherein the VH CDR1 sequence comprises GITFSNSG (SEQ ID NO: 1705); the VH CDR2 sequence comprises IWYDGSKR (SEQ ID NO: 1706); and the VH CDR3 sequence comprises TNDDY (SEQ ID NO: 1707).

[0159] In some embodiments, the activatable anti-PD-1 antibody includes a combination of a variable light chain complementarity determining region 1 (VL CDR1, also referred to herein as CDRL1) sequence, a variable light chain complementarity determining region 2 (VL CDR2, also referred to herein as CDRL2) sequence, and a variable light chain complementarity determining region 3 (VL CDR3, also referred to herein as CDRL3) sequence, wherein the VL CDR1 sequence comprises QSVSSY (SEQ ID NO: 1708); the VL CDR2 sequence comprises DAS (SEQ ID NO: 1709); and the VL CDR3 sequence comprises QQSSNWPRT (SEQ ID NO: 1710).

[0160] In some embodiments, the activatable anti-PD-1 antibody includes a combination of a VH CDR1 sequence, a VH CDR2 sequence, a VH CDR3 sequence, a VL CDR1 sequence, a VL CDR2 sequence, and a VL CDR3 sequence, wherein the VH CDR1 sequence comprises GITFSNSG (SEQ ID NO: 1705); the VH CDR2 sequence comprises IWYDGSKR (SEQ ID NO: 1706); the VH CDR3 sequence comprises TNDDY (SEQ ID NO: 1707); the VL CDR1 sequence comprises QSVSSY (SEQ ID NO: 1708); the VL CDR2 sequence comprises DAS (SEQ ID NO: 1709); and the VL CDR3 sequence comprises QQSSNWPRT (SEQ ID NO: 1710).

[0161] In some embodiments, the activatable anti-PD-1 antibody includes the combination of the complementarity determining region (CDR) sequences of the heavy chain amino acid sequence of SEQ ID NO: 1514. In some embodiments, the activatable anti-PD-1 antibody includes the combination of the CDR sequences of the light chain amino acid sequence of SEQ ID NO: 638. In some embodiments, the activatable anti-PD-1 antibody includes a combination of the CDR sequences of the heavy chain amino acid sequence of SEQ ID NO: 1514, and the CDR sequences of the light chain amino acid sequence of SEQ ID NO: 638.

[0162] In some embodiments, the activatable anti-PD-1 antibody includes a combination of a variable heavy chain complementarity determining region 1 (VH CDR1, also referred to herein as CDRH1) sequence, a variable heavy chain complementarity determining region 2 (VH CDR2, also referred to herein as CDRH2) sequence, and a variable heavy chain complementarity determining region 3 (VH CDR3, also referred to herein as CDRH3) sequence, wherein the VH CDR1 sequence comprises GYTFTNYY (SEQ ID NO: 1711); the VH CDR2 sequence comprises INPSNGGT (SEQ ID NO: 1712); and the VH CDR3 sequence comprises RRDYRFDMGFDY (SEQ ID NO: 1713).

[0163] In some embodiments, the activatable anti-PD-1 antibody includes a combination of a variable light chain complementarity determining region 1 (VL CDR1, also referred to herein as CDRL1) sequence, a variable light chain complementarity determining region 2 (VL CDR2, also referred to herein as CDRL2) sequence, and a variable light chain complementarity determining region 3 (VL CDR3, also referred to herein as CDRL3) sequence, wherein the VL CDR1 sequence comprises KGVSTSGYSY (SEQ ID NO: 1714); the VL CDR2 sequence comprises LAS (SEQ ID NO: 1715); and the VL CDR3 sequence comprises QHSRDLPLT (SEQ ID NO: 1716).

[0164] In some embodiments, the activatable anti-PD-1 antibody includes a combination of a VH CDR1 sequence, a VH CDR2 sequence, a VH CDR3 sequence, a VL CDR1 sequence, a VL CDR2 sequence, and a VL CDR3 sequence, wherein the VH CDR1 sequence comprises GYTFTNYY (SEQ ID NO: 1711); the VH CDR2 sequence comprises INPSNGGT (SEQ ID NO: 1712); the VH CDR3 sequence comprises RRDYRFDMGFDY (SEQ ID NO: 1713); the VL CDR1 sequence comprises KGVSTSGYSY (SEQ ID NO: 1714); the VL CDR2 sequence comprises LAS (SEQ ID NO: 1715); and the VL CDR3 sequence comprises QHSRDLPLT (SEQ ID NO: 1716).

[0165] In some embodiments, the activatable antibody comprises a heavy chain amino acid sequence that is at least 90%, 91%, 92%, 93%, 94%, 95%, 96%, 97%, 98% or 99% identical to an amino acid sequence selected from the group consisting of SEQ ID NO: 1, 5, 9, 13, 17, 21, 23, 25, 27, 29, 31, 33, 35, and 37. In some embodiments, the activatable antibody comprises a light chain amino acid that is at least 90%, 91%, 92%, 93%, 94%, 95%, 96%, 97%, 98% or 99% identical to an amino acid sequence amino acid sequence selected from the group consisting of SEQ ID NO: 3, 7, 11, 15, 19, 39, 41, 43, 45, 47, 49, 51, 53, 55, 57, and 59. In some embodiments, the activatable antibody comprises a heavy chain amino acid sequence that is at least 90%, 91%, 92%, 93%, 94%, 95%, 96%, 97%, 98% or 99% identical to an amino acid sequence selected from the group consisting of SEQ ID NO: 1, 5, 9, 13, 17, 21, 23, 25, 27, 29, 31, 33, 35, and 37, and a light chain amino acid that is at least 90%, 91%, 92%, 93%, 94%, 95%, 96%, 97%, 98% or 99% identical to an amino acid sequence amino acid sequence selected from the group consisting of SEQ ID NO: 3, 7, 11, 15, 19, 39, 41, 43, 45, 47, 49, 51, 53, 55, 57, and 59.

[0166] In some embodiments, the activatable antibody comprises a heavy chain amino acid sequence that is at least 90%, 91%, 92%, 93%, 94%, 95%, 96%, 97%, 98% or 99% identical to an amino acid sequence selected from the group consisting of SEQ ID NO: 21, 23, 25, 27, 29, 31, 33, 35, and 37. In some embodiments, the activatable antibody comprises a light chain amino acid that is at least 90%, 91%, 92%, 93%, 94%, 95%, 96%, 97%, 98% or 99% identical to an amino acid sequence amino acid sequence selected from the group consisting of SEQ ID NO: 39, 41, 43, 45, 47, 49, 51, 53, 55, 57, and 59. In some embodiments, the activatable antibody comprises a heavy chain amino acid sequence that is at least 90%, 91%, 92%, 93%, 94%, 95%, 96%, 97%, 98% or 99% identical to an amino acid sequence selected from the group consisting of SEQ ID NO: 21, 23, 25, 27, 29, 31, 33, 35, and 37, and a light chain amino acid that is at least 90%, 91%, 92%, 93%, 94%, 95%, 96%, 97%, 98% or 99% identical to an amino acid sequence amino acid sequence selected from the group consisting of SEQ ID NO: 39, 41, 43, 45, 47, 49, 51, 53, 55, 57, and 59. In some embodiments, the activatable anti-PD-1 antibody includes a heavy chain sequence that is at least 90%, 91%, 92%, 93%, 94%, 95%, 96%, 97%, 98% or 99% identical to the amino acid sequence of SEQ ID NO: 21, and a light chain sequence that is at least 90%, 91%, 92%, 93%, 94%, 95%, 96%, 97%, 98% or 99% identical to the amino acid sequence of SEQ ID NO: 45 or SEQ ID NO: 47. In some embodiments, the activatable anti-PD-1 antibody includes a heavy chain sequence that is at least 90%, 91%, 92%, 93%, 94%, 95%, 96%, 97%, 98% or 99% identical to the amino acid sequence of SEQ ID NO: 21, and a light chain sequence that is at least 90%, 91%, 92%, 93%, 94%, 95%, 96%, 97%, 98% or 99% identical to the amino acid sequence of SEQ ID NO: 45. In some embodiments, the activatable anti-PD-1 antibody includes a heavy chain sequence that is at least 90%, 91%, 92%, 93%, 94%, 95%, 96%, 97%, 98% or 99% identical to the amino acid sequence of SEQ ID NO: 21, and a light chain sequence that is at least 90%, 91%, 92%, 93%, 94%, 95%, 96%, 97%, 98% or 99% identical to the amino acid sequence of SEQ ID NO: 47.

[0167] In some embodiments, the activatable anti-PD-1 antibody includes a heavy chain sequence that is at least 90%, 91%, 92%, 93%, 94%, 95%, 96%, 97%, 98% or 99% identical to the amino acid sequence of SEQ ID NO: 1346, and a light chain sequence that is at least 90%, 91%, 92%, 93%, 94%, 95%, 96%, 97%, 98% or 99% identical to the amino acid sequence of SEQ ID NO: 626.

[0168] In some embodiments, the activatable anti-PD-1 antibody includes a heavy chain sequence that is at least 90%, 91%, 92%, 93%, 94%, 95%, 96%, 97%, 98% or 99% identical to the amino acid sequence of SEQ ID NO: 1514, and a light chain sequence that is at least 90%, 91%, 92%, 93%, 94%, 95%, 96%, 97%, 98% or 99% identical to the amino acid sequence of SEQ ID NO: 638.

[0169] In some embodiments, the AB of the activatable anti-PD-1 antibody comprises a heavy chain amino acid sequence selected from the group consisting of the heavy chain sequences shown in Table 7. In some embodiments, the AB of the activatable anti-PD-1 antibody comprises a light chain amino acid sequence selected from the group consisting of the light chain sequences shown in Table 7. In some embodiments, the AB of the activatable anti-PD-1 antibody comprises a heavy chain amino acid sequence selected from the group consisting of the heavy chain sequences shown in Table 7 and a light chain amino acid sequence selected from the group consisting of the light chain sequences shown in Table 7.

[0170] In some embodiments, the AB of the activatable anti-PD-1 antibody comprises a heavy chain amino acid sequence that is at least 90%, 91%, 92%, 93%, 94%, 95%, 96%, 97%, 98% or 99% identical to an amino acid sequence selected from the group consisting of the heavy chain sequences shown in Table 7. In some embodiments, the AB of the activatable anti-PD-1 antibody comprises a light chain amino acid sequence that is at least 90%, 91%, 92%, 93%, 94%, 95%, 96%, 97%, 98% or 99% identical to an amino acid sequence selected from the group consisting of the light chain sequences shown in Table 7. In some embodiments, the AB of the activatable anti-PD-1 antibody comprises a heavy chain amino acid sequence that is at least 90%, 91%, 92%, 93%, 94%, 95%, 96%, 97%, 98% or 99% identical to an amino acid sequence selected from the group consisting of the heavy chain sequences shown in Table 7 and a light chain amino acid sequence that is at least 90%, 91%, 92%, 93%, 94%, 95%, 96%, 97%, 98% or 99% identical to an amino acid sequence selected from the group consisting of the light chain sequences shown in Table 7.

[0171] In some embodiments, the AB of the activatable antibody includes a combination of a VH CDR1 sequence, a VH CDR2 sequence, and a VH CDR3 sequence, wherein the VH CDR1 sequence comprises a sequence that is at least 90%, 91%, 92%, 93%, 94%, 95%, 96%, 97%, 98%, 99% or more identical to GITFSNSG (SEQ ID NO: 1705); the VH CDR2 sequence comprises a sequence that is at least 90%, 91%, 92%, 93%, 94%, 95%, 96%, 97%, 98%, 99% or more identical to IWYDGSKR (SEQ ID NO: 1706); and the VH CDR3 sequence comprises a sequence that is at least 90%, 91%, 92%, 93%, 94%, 95%, 96%, 97%, 98%, 99% or more identical to TNDDY (SEQ ID NO: 1707).

[0172] In some embodiments, the AB of the activatable antibody includes a combination of a VL CDR1 sequence, a VL CDR2 sequence, and a VL CDR3 sequence, wherein the VL CDR1 sequence comprises a sequence that is at least 90%, 91%, 92%, 93%, 94%, 95%, 96%, 97%, 98%, 99% or more identical to QSVSSY (SEQ ID NO: 1708); the VL CDR2 sequence comprises a sequence that is at least 90%, 91%, 92%, 93%, 94%, 95%, 96%, 97%, 98%, 99% or more identical to DAS (SEQ ID NO: 1709); and the VL CDR3 sequence comprises a sequence that is at least 90%, 91%, 92%, 93%, 94%, 95%, 96%, 97%, 98%, 99% or more identical to QQSSNWPRT (SEQ ID NO: 1710).

[0173] In some embodiments, the AB of the activatable antibody includes a combination of a VH CDR1 sequence, a VH CDR2 sequence, a VH CDR3 sequence, a VL CDR1 sequence, a VL CDR2 sequence, and a VL CDR3 sequence, wherein the VH CDR1 sequence comprises a sequence that is at least 90%, 91%, 92%, 93%, 94%, 95%, 96%, 97%, 98%, 99% or more identical to GITFSNSG (SEQ ID NO: 1705); the VH CDR2 sequence comprises a sequence that is at least 90%, 91%, 92%, 93%, 94%, 95%, 96%, 97%, 98%, 99% or more identical to IWYDGSKR (SEQ ID NO: 1706); the VH CDR3 sequence comprises a sequence that is at least 90%, 91%, 92%, 93%, 94%, 95%, 96%, 97%, 98%, 99% or more identical to TNDDY (SEQ ID NO: 1707); the VL CDR1 sequence comprises a sequence that is at least 90%, 91%, 92%, 93%, 94%, 95%, 96%, 97%, 98%, 99% or more identical to QSVSSY (SEQ ID NO: 1708); the VL CDR2 sequence comprises a sequence that is at least 90%, 91%, 92%, 93%, 94%, 95%, 96%, 97%, 98%, 99% or more identical to DAS (SEQ ID NO: 1709); and the VL CDR3 sequence comprises a sequence that is at least 90%, 91%, 92%, 93%, 94%, 95%, 96%, 97%, 98%, 99% or more identical to QQSSNWPRT (SEQ ID NO: 1710).

[0174] In some embodiments, the AB of the activatable antibody includes a combination of a VH CDR1 sequence, a VH CDR2 sequence, and a VH CDR3 sequence, wherein the VH CDR1 sequence comprises a sequence that is at least 90%, 91%, 92%, 93%, 94%, 95%, 96%, 97%, 98%, 99% or more identical to GYTFTNYY (SEQ ID NO: 1711); the VH CDR2 sequence comprises a sequence that is at least 90%, 91%, 92%, 93%, 94%, 95%, 96%, 97%, 98%, 99% or more identical to INPSNGGT (SEQ ID NO: 1712); and the VH CDR3 sequence comprises a sequence that is at least 90%, 91%, 92%, 93%, 94%, 95%, 96%, 97%, 98%, 99% or more identical to RRDYRFDMGFDY (SEQ ID NO: 1713).

[0175] In some embodiments, the AB of the activatable antibody includes a combination of a VL CDR1 sequence, a VL CDR2 sequence, and a VL CDR3 sequence, wherein the VL CDR1 sequence comprises a sequence that is at least 90%, 91%, 92%, 93%, 94%, 95%, 96%, 97%, 98%, 99% or more identical to KGVSTSGYSY (SEQ ID NO: 1714); the VL CDR2 sequence comprises a sequence that is at least 90%, 91%, 92%, 93%, 94%, 95%, 96%, 97%, 98%, 99% or more identical to LAS (SEQ ID NO: 1715); and the VL CDR3 sequence comprises a sequence that is at least 90%, 91%, 92%, 93%, 94%, 95%, 96%, 97%, 98%, 99% or more identical to QHSRDLPLT (SEQ ID NO: 1716).

[0176] In some embodiments, the AB of the activatable antibody includes a combination of a VH CDR1 sequence, a VH CDR2 sequence, a VH CDR3 sequence, a VL CDR1 sequence, a VL CDR2 sequence, and a VL CDR3 sequence, wherein the VH CDR1 sequence comprises a sequence that is at least 90%, 91%, 92%, 93%, 94%, 95%, 96%, 97%, 98%, 99% or more identical to GYTFTNYY (SEQ ID NO: 1711); the VH CDR2 sequence comprises a sequence that is at least 90%, 91%, 92%, 93%, 94%, 95%, 96%, 97%, 98%, 99% or more identical to INPSNGGT (SEQ ID NO: 1712); the VH CDR3 sequence comprises a sequence that is at least 90%, 91%, 92%, 93%, 94%, 95%, 96%, 97%, 98%, 99% or more identical to RRDYRFDMGFDY (SEQ ID NO: 1713); the VL CDR1 sequence comprises a sequence that is at least 90%, 91%, 92%, 93%, 94%, 95%, 96%, 97%, 98%, 99% or more identical to KGVSTSGYSY (SEQ ID NO: 1714); the VL CDR2 sequence comprises a sequence that is at least 90%, 91%, 92%, 93%, 94%, 95%, 96%, 97%, 98%, 99% or more identical to LAS (SEQ ID NO: 1715); and the VL CDR3 sequence comprises a sequence that is at least 90%, 91%, 92%, 93%, 94%, 95%, 96%, 97%, 98%, 99% or more identical to QHSRDLPLT (SEQ ID NO: 1716).

[0177] In some embodiments, the activatable antibody comprises a combination of a variable heavy chain complementarity determining region 1 (VH CDR1, also referred to herein as CDRH1) sequence, a variable heavy chain complementarity determining region 2 (VH CDR2, also referred to herein as CDRH2) sequence, a variable heavy chain complementarity determining region 3 (VH CDR3, also referred to herein as CDRH3) sequence, a variable light chain complementarity determining region 1 (VL CDR1, also referred to herein as CDRL1) sequence, a variable light chain complementarity determining region 2 (VL CDR2, also referred to herein as CDRL2) sequence, and a variable light chain complementarity determining region 3 (VL CDR3, also referred to herein as CDRL3) sequence, wherein at least one CDR sequence is selected from the group consisting of a VH CDR1 sequence shown in Table 8; a VH CDR2 sequence shown in Table 8; a VH CDR3 sequence shown in Table 8; a VL CDR1 sequence shown in Table 8; a VL CDR2 sequence shown in Table 8; and a VL CDR3 sequence shown in Table 8.

[0178] In some embodiments, the activatable antibody comprises a combination of a VH CDR1 sequence, a VH CDR2 sequence, a VH CDR3 sequence, a VL CDR1 sequence, a VL CDR2 sequence, and a VL CDR3 sequence, wherein at least one CDR sequence is selected from the group consisting of a VH CDR1 sequence that includes a sequence that is at least 90%, 91%, 92%, 93%, 94%, 95%, 96%, 97%, 98%, 99% or more identical to a VH CDR1 sequence shown in Table 8; a VH CD2 sequence that includes a sequence that is at least 90%, 91%, 92%, 93%, 94%, 95%, 96%, 97%, 98%, 99% or more identical to a VH CDR2 sequence shown in Table 8; a VH CDR3 sequence that includes a sequence that is at least 90%, 91%, 92%, 93%, 94%, 95%, 96%, 97%, 98%, 99% or more identical to a VH CDR3 sequence shown in Table 8; a VL CDR1 sequence that includes a sequence that is at least 90%, 91%, 92%, 93%, 94%, 95%, 96%, 97%, 98%, 99% or more identical to a VL CDR1 sequence shown in Table 8; a VL CDR2 sequence that includes a sequence that is at least 90%, 91%, 92%, 93%, 94%, 95%, 96%, 97%, 98%, 99% or more identical to a VL CDR2 sequence shown in Table 8; and a VL CDR3 sequence that includes a sequence that is at least 90%, 91%, 92%, 93%, 94%, 95%, 96%, 97%, 98%, 99% or more identical to a VL CDR3 sequence shown in Table 8.

[0179] In some embodiments, the activatable antibody comprises a combination of a VH CDR1 sequence, a VH CDR2 sequence, a VH CDR3 sequence shown in a single row in Table 8, and a VL CDR1 sequence, a VL CDR2 sequence, and a VL CDR3 sequence shown in a single row in Table 8.

[0180] In some embodiments, the antibody comprises a heavy chain that comprises a combination of a VH CDR1 sequence, a VH CDR2 sequence, and a VH CDR3 sequence, wherein the combination is a combination of the three heavy chain CDR sequences (VH CDR1, VH CDR2, VH CDR3) shown in a single row in Table 8.

[0181] In some embodiments, the activatable antibody comprises a combination of a VH CDR1 sequence, a VH CDR2 sequence, a VH CDR3 sequence shown in a single row in Table 8, a VL CDR1 sequence, a VL CDR2 sequence, and a VL CDR3 sequence shown in a single row in Table 8, wherein each CDR sequence in the combination comprises a sequence that is at least 90%, 91%, 92%, 93%, 94%, 95%, 96%, 97%, 98%, 99% or more identical to the corresponding CDR sequence in a combination of the three VH CDR sequences (VH CDR1, VH CDR2, VH CDR3) shown in a single row in Table 8 and in a combination of the three VL CDR sequences (VL CDR1, VL CDR2, and VL CDR3) shown in a single row in Table 8.

[0182] In some embodiments, the antibody comprises a heavy chain that comprises a combination of a VH CDR1 sequence, a VH CDR2 sequence, and a VH CDR3 sequence, wherein each CDR sequence in the combination comprises a sequence that is at least 90%, 91%, 92%, 93%, 94%, 95%, 96%, 97%, 98%, 99% or more identical to the corresponding CDR sequence in a combination of three heavy chain CDR sequences (VH CDR1, VH CDR2, VH CDR3) shown in a single row in Table 8.

[0183] In some embodiments, the activatable antibody comprises a combination of a variable heavy chain complementarity determining region 1 (VH CDR1, also referred to herein as CDRH1) sequence, a variable heavy chain complementarity determining region 2 (VH CDR2, also referred to herein as CDRH2) sequence, a variable heavy chain complementarity determining region 3 (VH CDR3, also referred to herein as CDRH3) sequence, a variable light chain complementarity determining region 1 (VL CDR1, also referred to herein as CDRL1) sequence, a variable light chain complementarity determining region 2 (VL CDR2, also referred to herein as CDRL2) sequence, and a variable light chain complementarity determining region 3 (VL CDR3, also referred to herein as CDRL3) sequence, wherein at least one CDR sequence is selected from the group consisting of a VH CDR1 sequence shown in Table 9; a VH CDR2 sequence shown in Table 9; a VH CDR3 sequence shown in Table 9; a VL CDR1 sequence shown in Table 9; a VL CDR2 sequence shown in Table 9; and a VL CDR3 sequence shown in Table 9.

[0184] In some embodiments, the activatable antibody comprises a combination of a VH CDR1 sequence, a VH CDR2 sequence, a VH CDR3 sequence, a VL CDR1 sequence, a VL CDR2 sequence, and a VL CDR3 sequence, wherein at least one CDR sequence is selected from the group consisting of a VH CDR1 sequence that includes a sequence that is at least 90%, 91%, 92%, 93%, 94%, 95%, 96%, 97%, 98%, 99% or more identical to a VH CDR1 sequence shown in Table 9; a VH CD2 sequence that includes a sequence that is at least 90%, 91%, 92%, 93%, 94%, 95%, 96%, 97%, 98%, 99% or more identical to a VH CDR2 sequence shown in Table 9; a VH CDR3 sequence that includes a sequence that is at least 90%, 91%, 92%, 93%, 94%, 95%, 96%, 97%, 98%, 99% or more identical to a VH CDR3 sequence shown in Table 9; a VL CDR1 sequence that includes a sequence that is at least 90%, 91%, 92%, 93%, 94%, 95%, 96%, 97%, 98%, 99% or more identical to a VL CDR1 sequence shown in Table 9; a VL CDR2 sequence that includes a sequence that is at least 90%, 91%, 92%, 93%, 94%, 95%, 96%, 97%, 98%, 99% or more identical to a VL CDR2 sequence shown in Table 9; and a VL CDR3 sequence that includes a sequence that is at least 90%, 91%, 92%, 93%, 94%, 95%, 96%, 97%, 98%, 99% or more identical to a VL CDR3 sequence shown in Table 9.

[0185] In some embodiments, the activatable antibody comprises a combination of a VH CDR1 sequence, a VH CDR2 sequence, a VH CDR3 sequence, a VL CDR1 sequence, a VL CDR2 sequence, and a VL CDR3 sequence, wherein the combination is a combination shown in Table 9.

[0186] In some embodiments, the activatable antibody comprises a combination of a VH CDR1 sequence, a VH CDR2 sequence, a VH CDR3 sequence, a VL CDR1 sequence, a VL CDR2 sequence, and a VL CDR3 sequence, wherein each CDR sequence in the combination comprises a sequence that is at least 90%, 91%, 92%, 93%, 94%, 95%, 96%, 97%, 98%, 99% or more identical to the corresponding CDR sequence in a combination shown in Table 9.

[0187] In some embodiments, the activatable antibody comprises a masking moiety (MM) comprising an amino acid sequence selected from the group consisting of SEQ ID NOs: 66, 67, 70, 71, 74, 77, 81, 82, 84, 90, 91, 93, 99; a cleavable moiety (CM) comprising an amino acid sequence selected from the group consisting of SEQ ID NOs: 214, 294, 300, 302, 303, 305, 308, 318, 347, 361, 1092-1102, 1111, and 1157; and a combination of a VH CDR1 sequence, a VH CDR2 sequence, a VH CDR3 sequence, a VL CDR1 sequence, a VL CDR2 sequence, and a VL CDR3 sequence, wherein the combination comprises the VL CDR1 sequence of SEQ ID NO: 675 or SEQ ID NO: 676; the VL CDR2 sequence of SEQ ID NO: 678; the VL CDR3 sequence of SEQ ID NO: 683; the VH CDR1 sequence of SEQ ID NO: 653; the VH CDR2 sequence of SEQ ID NO: 658; and the VH CDR3 sequence of SEQ ID NO: 664.

[0188] In some embodiments, the activatable antibody comprises a masking moiety (MM) comprising an amino acid sequence selected from the group consisting of SEQ ID NOs: 66, 67, 70, 71, 74, 77, 81, 82, 84, 90, 91, 93, 99; a cleavable moiety; a cleavable moiety (CM) comprising an amino acid sequence selected from the group consisting of SEQ ID NOs: 214, 294, 300, 302, 303, 305, 308, 318, 347, 361, 1092-1102, 1111, and 1157; a combination of a VH CDR1 sequence, a VH CDR2 sequence, a VH CDR3 sequence, a VL CDR1 sequence, a VL CDR2 sequence, and a VL CDR3 sequence, wherein the combination comprises the VL CDR1 sequence of SEQ ID NO: 675 or SEQ ID NO: 676; the VL CDR2 sequence of SEQ ID NO: 678; the VL CDR3 sequence of SEQ ID NO: 683; the VH CDR1 sequence of SEQ ID NO: 653; the VH CDR2 sequence of SEQ ID NO: 658; and the VH CDR3 sequence of SEQ ID NO: 664, and a human immunoglobulin light chain constant domain. In some embodiments, the human immunoglobulin light chain constant domain is a human kappa constant domain comprising SEQ ID NO: 61 or SEQ ID NO: 1344.

[0189] In some embodiments, the activatable antibody comprises a masking moiety (MM) comprising an amino acid sequence selected from the group consisting of SEQ ID NOs: 66, 67, 70, 71, 74, 77, 81, 82, 84, 90, 91, 93, 99; a cleavable moiety (CM) comprising an amino acid sequence selected from the group consisting of SEQ ID NOs: 214, 294, 300, 302, 303, 305, 308, 318, 347, 361, 1092-1102, 1111, and 1157; a combination of a VH CDR1 sequence, a VH CDR2 sequence, a VH CDR3 sequence, a VL CDR1 sequence, a VL CDR2 sequence, and a VL CDR3 sequence, wherein the combination comprises the VL CDR1 sequence of SEQ ID NO: 675 or SEQ ID NO: 676; the VL CDR2 sequence of SEQ ID NO: 678; the VL CDR3 sequence of SEQ ID NO: 683; the VH CDR1 sequence of SEQ ID NO: 653; the VH CDR2 sequence of SEQ ID NO: 658; and the VH CDR3 sequence of SEQ ID NO: 664, and a human immunoglobulin heavy chain constant domain. In some embodiments, the human immunoglobulin heavy chain constant domain comprises an amino acid sequence selected from the group consisting of 381, 382, 383, and 1807.

[0190] In some embodiments, the activatable antibody comprises a masking moiety (MM) comprising an amino acid sequence selected from the group consisting of SEQ ID NOs: 66, 67, 70, 71, 74, 77, 81, 82, 84, 90, 91, 93, 99; a cleavable moiety (CM) comprising an amino acid sequence selected from the group consisting of SEQ ID NOs: 214, 294, 300, 302, 303, 305, 308, 318, 347, 361, 1092-1102, 1111, and 1157; a combination of a VH CDR1 sequence, a VH CDR2 sequence, a VH CDR3 sequence, a VL CDR1 sequence, a VL CDR2 sequence, and a VL CDR3 sequence, wherein the combination comprises the VL CDR1 sequence of SEQ ID NO: 675 or SEQ ID NO: 676; the VL CDR2 sequence of SEQ ID NO: 678; the VL CDR3 sequence of SEQ ID NO: 683; the VH CDR1 sequence of SEQ ID NO: 653; the VH CDR2 sequence of SEQ ID NO: 658; and the VH CDR3 sequence of SEQ ID NO: 664, a human immunoglobulin heavy chain constant region, and a human immunoglobulin light chain constant domain. In some embodiments, the human immunoglobulin heavy chain constant domain comprises an amino acid sequence selected from the group consisting of SEQ ID NO: 63, 381, 382, 383, and 1807, and the human immunoglobulin light chain constant domain is a human kappa constant domain comprising SEQ ID NO: 61 or SEQ ID NO: 1344.

[0191] n some embodiments, the activatable antibody comprises a masking moiety (MM) comprising an amino acid sequence selected from the group consisting of SEQ ID NOs: 66, 67, 70, 71, 74, 77, 81, 82, 84, 90, 91, 93, 99; a cleavable moiety (CM) comprising an amino acid sequence selected from the group consisting of SEQ ID NOs: 214, 294, 300, 302, 303, 305, 308, 318, 347, 361, 1092-1102, 1111, and 1157; a combination of a VH CDR1 sequence, a VH CDR2 sequence, a VH CDR3 sequence, a VL CDR1 sequence, a VL CDR2 sequence, and a VL CDR3 sequence, wherein the combination comprises the VL CDR1 sequence of SEQ ID NO: 675; the VL CDR2 sequence of SEQ ID NO: 678; the VL CDR3 sequence of SEQ ID NO: 683; the VH CDR1 sequence of SEQ ID NO: 653; the VH CDR2 sequence of SEQ ID NO: 658; and the VH CDR3 sequence of SEQ ID NO: 664.

[0192] In some embodiments, the activatable antibody comprises a masking moiety (MM) comprising an amino acid sequence selected from the group consisting of SEQ ID NOs: 66, 67, 70, 71, 74, 77, 81, 82, 84, 90, 91, 93, 99; a cleavable moiety (CM) comprising an amino acid sequence selected from the group consisting of SEQ ID NOs: 214, 294, 300, 302, 303, 305, 308, 318, 347, 361, 1092-1102, 1111, and 1157; a combination of a VH CDR1 sequence, a VH CDR2 sequence, a VH CDR3 sequence, a VL CDR1 sequence, a VL CDR2 sequence, and a VL CDR3 sequence, wherein the combination comprises the VL CDR1 sequence of SEQ ID NO: 675; the VL CDR2 sequence of SEQ ID NO: 678; the VL CDR3 sequence of SEQ ID NO: 683; the VH CDR1 sequence of SEQ ID NO: 653; the VH CDR2 sequence of SEQ ID NO: 658; and the VH CDR3 sequence of SEQ ID NO: 664, and a human immunoglobulin light chain constant domain. In some embodiments, the human immunoglobulin light chain constant domain is a human kappa constant domain comprising SEQ ID NO: 61 or SEQ ID NO: 1344.

[0193] In some embodiments, the activatable antibody comprises a masking moiety (MM) comprising an amino acid sequence selected from the group consisting of SEQ ID NOs: 66, 67, 70, 71, 74, 77, 81, 82, 84, 90, 91, 93, 99; a cleavable moiety (CM) comprising an amino acid sequence selected from the group consisting of SEQ ID NOs: 214, 294, 300, 302, 303, 305, 308, 318, 347, 361, 1092-1102, 1111, and 1157; a combination of a VH CDR1 sequence, a VH CDR2 sequence, a VH CDR3 sequence, a VL CDR1 sequence, a VL CDR2 sequence, and a VL CDR3 sequence, wherein the combination comprises the VL CDR1 sequence of SEQ ID NO: 675; the VL CDR2 sequence of SEQ ID NO: 678; the VL CDR3 sequence of SEQ ID NO: 683; the VH CDR1 sequence of SEQ ID NO: 653; the VH CDR2 sequence of SEQ ID NO: 658; and the VH CDR3 sequence of SEQ ID NO: 664, and a human immunoglobulin heavy chain constant domain. In some embodiments, the human immunoglobulin heavy chain constant domain comprises an amino acid sequence selected from the group consisting of SEQ ID NO: 63, 381, 382, 383, and 1807.

[0194] In some embodiments, the activatable antibody comprises a masking moiety (MM) comprising an amino acid sequence selected from the group consisting of SEQ ID NOs: 66, 67, 70, 71, 74, 77, 81, 82, 84, 90, 91, 93, 99; a cleavable moiety (CM) comprising an amino acid sequence selected from the group consisting of SEQ ID NOs: 214, 294, 300, 302, 303, 305, 308, 318, 347, 361, 1092-1102, 1111, and 1157; a combination of a VH CDR1 sequence, a VH CDR2 sequence, a VH CDR3 sequence, a VL CDR1 sequence, a VL CDR2 sequence, and a VL CDR3 sequence, wherein the combination comprises the VL CDR1 sequence of SEQ ID NO: 675; the VL CDR2 sequence of SEQ ID NO: 678; the VL CDR3 sequence of SEQ ID NO: 683; the VH CDR1 sequence of SEQ ID NO: 653; the VH CDR2 sequence of SEQ ID NO: 658; and the VH CDR3 sequence of SEQ ID NO: 664, a human immunoglobulin heavy chain constant region, and a human immunoglobulin light chain constant domain. In some embodiments, the human immunoglobulin heavy chain constant domain comprises an amino acid sequence selected from the group consisting of SEQ ID NO: 63, 381, 382, 383, and 1807, and the human immunoglobulin light chain constant domain is a human kappa constant domain comprising SEQ ID NO: 61 or SEQ ID NO: 1344.

[0195] In some embodiments, the activatable antibody comprises a masking moiety (MM) comprising an amino acid sequence selected from the group consisting of SEQ ID NOs: 66, 67, 70, 71, 74, 77, 81, 82, 84, 90, 91, 93, 99; a cleavable moiety (CM) comprising an amino acid sequence selected from the group consisting of SEQ ID NOs: 214, 294, 300, 302, 303, 305, 308, 318, 347, 361, 1092-1102, 1111, and 1157; and a combination of a VH CDR1 sequence, a VH CDR2 sequence, a VH CDR3 sequence, a VL CDR1 sequence, a VL CDR2 sequence, and a VL CDR3 sequence, wherein the combination comprises the VL CDR1 sequence of SEQ ID NO: 676; the VL CDR2 sequence of SEQ ID NO: 678; the VL CDR3 sequence of SEQ ID NO: 683; the VH CDR1 sequence of SEQ ID NO: 653; the VH CDR2 sequence of SEQ ID NO: 658; and the VH CDR3 sequence of SEQ ID NO: 664.

[0196] In some embodiments, the activatable antibody comprises a masking moiety (MM) comprising an amino acid sequence selected from the group consisting of SEQ ID NOs: 66, 67, 70, 71, 74, 77, 81, 82, 84, 90, 91, 93, 99; a cleavable moiety (CM) comprising an amino acid sequence selected from the group consisting of SEQ ID NOs: 214, 294, 300, 302, 303, 305, 308, 318, 347, 361, 1092-1102, 1111, and 1157; a combination of a VH CDR1 sequence, a VH CDR2 sequence, a VH CDR3 sequence, a VL CDR1 sequence, a VL CDR2 sequence, and a VL CDR3 sequence, wherein the combination comprises the VL CDR1 sequence of SEQ ID NO: 676; the VL CDR2 sequence of SEQ ID NO: 678; the VL CDR3 sequence of SEQ ID NO: 683; the VH CDR1 sequence of SEQ ID NO: 653; the VH CDR2 sequence of SEQ ID NO: 658; and the VH CDR3 sequence of SEQ ID NO: 664, and a human immunoglobulin light chain constant domain. In some embodiments, the human immunoglobulin light chain constant domain is a human kappa constant domain comprising SEQ ID NO: 61 or SEQ ID NO: 1344.

[0197] In some embodiments, the activatable antibody comprises a masking moiety (MM) comprising an amino acid sequence selected from the group consisting of SEQ ID NOs: 66, 67, 70, 71, 74, 77, 81, 82, 84, 90, 91, 93, 99; a cleavable moiety (CM) comprising an amino acid sequence selected from the group consisting of SEQ ID NOs: 214, 294, 300, 302, 303, 305, 308, 318, 347, 361, 1092-1102, 1111, and 1157; a combination of a VH CDR1 sequence, a VH CDR2 sequence, a VH CDR3 sequence, a VL CDR1 sequence, a VL CDR2 sequence, and a VL CDR3 sequence, wherein the combination comprises the VL CDR1 sequence of SEQ ID NO: 676; the VL CDR2 sequence of SEQ ID NO: 678; the VL CDR3 sequence of SEQ ID NO: 683; the VH CDR1 sequence of SEQ ID NO: 653; the VH CDR2 sequence of SEQ ID NO: 658; and the VH CDR3 sequence of SEQ ID NO: 664, and a human immunoglobulin heavy chain constant domain. In some embodiments, the human immunoglobulin heavy chain constant domain comprises an amino acid sequence selected from the group consisting of SEQ ID NO: 63, 381, 382, 383, and 1807.

[0198] In some embodiments, the activatable antibody comprises a masking moiety (MM) comprising an amino acid sequence selected from the group consisting of SEQ ID NOs: 66, 67, 70, 71, 74, 77, 81, 82, 84, 90, 91, 93, 99; a cleavable moiety (CM) comprising an amino acid sequence selected from the group consisting of SEQ ID NOs: 214, 294, 300, 302, 303, 305, 308, 318, 347, 361, 1092-1102, 1111, and 1157; a combination of a VH CDR1 sequence, a VH CDR2 sequence, a VH CDR3 sequence, a VL CDR1 sequence, a VL CDR2 sequence, and a VL CDR3 sequence, wherein the combination comprises the VL CDR1 sequence of SEQ ID NO: 676; the VL CDR2 sequence of SEQ ID NO: 678; the VL CDR3 sequence of SEQ ID NO: 683; the VH CDR1 sequence of SEQ ID NO: 653; the VH CDR2 sequence of SEQ ID NO: 658; and the VH CDR3 sequence of SEQ ID NO: 664, a human immunoglobulin heavy chain constant region, and a human immunoglobulin light chain constant domain. In some embodiments, the human immunoglobulin heavy chain constant domain comprises an amino acid sequence selected from the group consisting of SEQ ID NO: 63, 381, 382, 383, and 1807, and the human immunoglobulin light chain constant domain is a human kappa constant domain comprising SEQ ID NO: 61 or SEQ ID NO: 1344.

[0199] In some embodiments, the activatable antibody comprises a MM comprising an amino acid sequence selected from the group consisting of SEQ ID NOs: 66, 67, 70, 71, 74, 77, 81, 82, 84, 90, 91, 93, 99; a CM comprising an amino acid sequence selected from the group consisting of SEQ ID NOs: 214, 294, 300, 302, 303, 305, 308, 318, 347, 361, 1092-1102, 1111, and 1157; and a combination of a VH CDR1 sequence, a VH CDR2 sequence, a VH CDR3 sequence, a VL CDR1 sequence, a VL CDR2 sequence, and a VL CDR3 sequence, wherein the combination comprises the VH CDR sequences of the variable heavy chain sequence of SEQ ID NO: 21 and the VL CDR sequences of the variable light chain sequence of SEQ ID NO: 47. In some embodiments, the combination further comprises a human immunoglobulin heavy chain constant region, a human immunoglobulin light chain constant domain, or both a human immunoglobulin heavy chain constant region and a human immunoglobulin light chain constant domain. In some embodiments, the human immunoglobulin heavy chain constant domain comprises an amino acid sequence selected from the group consisting of SEQ ID NO: 63, 381, 382, 383, and 1807. In some embodiments, the human immunoglobulin light chain constant domain is a human kappa constant domain comprising SEQ ID NO: 61 or SEQ ID NO: 1344.

[0200] In some embodiments, the activatable antibody comprises a MM comprising an amino acid sequence selected from the group consisting of SEQ ID NOs: 66, 67, 70, 71, 74, 77, 81, 82, 84, 90, 91, 93, 99; a CM comprising an amino acid sequence selected from the group consisting of SEQ ID NOs: 214, 294, 300, 302, 303, 305, 308, 318, 347, 361, 1092-1102, 1111, and 1157; and a combination of a VH CDR1 sequence, a VH CDR2 sequence, a VH CDR3 sequence, a VL CDR1 sequence, a VL CDR2 sequence, and a VL CDR3 sequence, wherein the combination comprises the VL CDR1 sequence of SEQ ID NO: 676; the VL CDR2 sequence of SEQ ID NO: 678; the VL CDR3 sequence of SEQ ID NO: 683; the VH CDR1 sequence of SEQ ID NO: 653; the VH CDR2 sequence of SEQ ID NO: 658; and the VH CDR3 sequence of SEQ ID NO: 664. In some embodiments, the combination further comprises a human immunoglobulin heavy chain constant region, a human immunoglobulin light chain constant domain, or both a human immunoglobulin heavy chain constant region and a human immunoglobulin light chain constant domain. In some embodiments, the human immunoglobulin heavy chain constant domain comprises an amino acid sequence selected from the group consisting of SEQ ID NO: 63, 381, 382, 383, and 1807. In some embodiments, the human immunoglobulin light chain constant domain is a human kappa constant domain comprising SEQ ID NO: 61 or SEQ ID NO: 1344.

[0201] In some embodiments, the activatable antibody comprises a MM comprising an amino acid sequence selected from the group consisting of SEQ ID NOs: 66, 67, 70, 71, 74, 77, 81, 82, 84, 90, 91, 93, 99; a cleavable moiety (CM) comprising an amino acid sequence selected from the group consisting of SEQ ID NOs: 214, 294, 300, 302, 303, 305, 308, 318, 347, 361, 1092-1102, 1111, and 1157; and a combination of a variable heavy chain (VH) sequence of SEQ ID NO: 21 and a variable light chain (VL) sequence of SEQ ID NO: 47. In some embodiments, the combination further comprises a human immunoglobulin heavy chain constant region, a human immunoglobulin light chain constant domain, or both a human immunoglobulin heavy chain constant region and a human immunoglobulin light chain constant domain. In some embodiments, the human immunoglobulin heavy chain constant domain comprises an amino acid sequence selected from the group consisting of SEQ ID NO: 63, 381, 382, 383, and 1807. In some embodiments, the human immunoglobulin light chain constant domain is a human kappa constant domain comprising SEQ ID NO: 61 or SEQ ID NO: 1344.

[0202] In some embodiments, the activatable antibody comprises a masking moiety (MM) comprising the amino acid sequence TSYCSIEHYPCNTHH (SEQ ID NO: 99), which is referred to herein as mask PD034 or PD34, a cleavable moiety (CM) comprising the amino acid sequence ISSGLLSGRSDNP (SEQ ID NO: 1100), which is also referred to herein as substrate 2011, and a combination of a VH CDR1 sequence, a VH CDR2 sequence, a VH CDR3 sequence, a VL CDR1 sequence, a VL CDR2 sequence, and a VL CDR3 sequence, wherein the combination comprises the VH CDR sequences of the variable heavy chain sequence of SEQ ID NO: 21 and the VL CDR sequences of the variable light chain sequence of SEQ ID NO: 47. In some embodiments, the combination further comprises a human immunoglobulin heavy chain constant region, a human immunoglobulin light chain constant domain, or both a human immunoglobulin heavy chain constant region and a human immunoglobulin light chain constant domain. In some embodiments, the human immunoglobulin heavy chain constant domain comprises an amino acid sequence selected from the group consisting of SEQ ID NO: 63, 381, 382, 383, and 1807. In some embodiments, the human immunoglobulin light chain constant domain is a human kappa constant domain comprising SEQ ID NO: 61 or SEQ ID NO: 1344.

[0203] In some embodiments, the activatable antibody comprises a masking moiety (MM) comprising the amino acid sequence TSYCSIEHYPCNTHH (SEQ ID NO: 99), a cleavable moiety (CM) comprising the amino acid sequence ISSGLLSGRSDNP (SEQ ID NO: 1100), and a combination of a VH CDR1 sequence, a VH CDR2 sequence, a VH CDR3 sequence, a VL CDR1 sequence, a VL CDR2 sequence, and a VL CDR3 sequence, wherein the combination comprises the VL CDR1 sequence of SEQ ID NO: 676; the VL CDR2 sequence of SEQ ID NO: 678; the VL CDR3 sequence of SEQ ID NO: 683; the VH CDR1 sequence of SEQ ID NO: 653; the VH CDR2 sequence of SEQ ID NO: 658; and the VH CDR3 sequence of SEQ ID NO: 664. In some embodiments, the combination further comprises a human immunoglobulin heavy chain constant region, a human immunoglobulin light chain constant domain, or both a human immunoglobulin heavy chain constant region and a human immunoglobulin light chain constant domain. In some embodiments, the human immunoglobulin heavy chain constant domain comprises an amino acid sequence selected from the group consisting of SEQ ID NO: 63, 381, 382, 383, and 1807. In some embodiments, the human immunoglobulin light chain constant domain is a human kappa constant domain comprising SEQ ID NO: 61 or SEQ ID NO: 1344.

[0204] In some embodiments, the activatable antibody comprises a masking moiety (MM) comprising the amino acid sequence TSYCSIEHYPCNTHH (SEQ ID NO: 99), a cleavable moiety (CM) comprising the amino acid sequence ISSGLLSGRSDNP (SEQ ID NO: 1100), and a combination of a variable heavy chain (VH) sequence of SEQ ID NO: 21 and a variable light chain (VL) sequence of SEQ ID NO: 47. In some embodiments, the combination further comprises a human immunoglobulin heavy chain constant region, a human immunoglobulin light chain constant domain, or both a human immunoglobulin heavy chain constant region and a human immunoglobulin light chain constant domain. In some embodiments, the human immunoglobulin heavy chain constant domain comprises an amino acid sequence selected from the group consisting of SEQ ID NO: 63, 381, 382, 383, and 1807. In some embodiments, the human immunoglobulin light chain constant domain is a human kappa constant domain comprising SEQ ID NO: 61 or SEQ ID NO: 1344.

[0205] In some embodiments, the activatable antibody comprises a masking moiety (MM) comprising the amino acid sequence TSYCSIEHYPCNTHH (SEQ ID NO: 99), which is referred to herein as mask PD034 or PD34, a cleavable moiety (CM) comprising the amino acid sequence ISSGLLSGRSANP (SEQ ID NO: 1101), which is also referred to herein as substrate 2012, and a combination of a VH CDR1 sequence, a VH CDR2 sequence, a VH CDR3 sequence, a VL CDR1 sequence, a VL CDR2 sequence, and a VL CDR3 sequence, wherein the combination comprises the VH CDR sequences of the variable heavy chain sequence of SEQ ID NO: 21 and the VL CDR sequences of the variable light chain sequence of SEQ ID NO: 47. In some embodiments, the combination further comprises a human immunoglobulin heavy chain constant region, a human immunoglobulin light chain constant domain, or both a human immunoglobulin heavy chain constant region and a human immunoglobulin light chain constant domain. In some embodiments, the human immunoglobulin heavy chain constant domain comprises an amino acid sequence selected from the group consisting of SEQ ID NO: 63, 381, 382, 383, and 1807. In some embodiments, the human immunoglobulin light chain constant domain is a human kappa constant domain comprising SEQ ID NO: 61 or SEQ ID NO: 1344.

[0206] In some embodiments, the activatable antibody comprises a masking moiety (MM) comprising the amino acid sequence TSYCSIEHYPCNTHH (SEQ ID NO: 99), a cleavable moiety (CM) comprising the amino acid sequence ISSGLLSGRSANP (SEQ ID NO: 1101), and a combination of a VH CDR1 sequence, a VH CDR2 sequence, a VH CDR3 sequence, a VL CDR1 sequence, a VL CDR2 sequence, and a VL CDR3 sequence, wherein the combination comprises the VL CDR1 sequence of SEQ ID NO: 676; the VL CDR2 sequence of SEQ ID NO: 678; the VL CDR3 sequence of SEQ ID NO: 683; the VH CDR1 sequence of SEQ ID NO: 653; the VH CDR2 sequence of SEQ ID NO: 658; and the VH CDR3 sequence of SEQ ID NO: 664. In some embodiments, the combination further comprises a human immunoglobulin heavy chain constant region, a human immunoglobulin light chain constant domain, or both a human immunoglobulin heavy chain constant region and a human immunoglobulin light chain constant domain. In some embodiments, the human immunoglobulin heavy chain constant domain comprises an amino acid sequence selected from the group consisting of SEQ ID NO: 63, 381, 382, 383, and 1807. In some embodiments, the human immunoglobulin light chain constant domain is a human kappa constant domain comprising SEQ ID NO: 61 or SEQ ID NO: 1344.

[0207] In some embodiments, the activatable antibody comprises a masking moiety (MM) comprising the amino acid sequence TSYCSIEHYPCNTHH (SEQ ID NO: 99), a cleavable moiety (CM) comprising the amino acid sequence ISSGLLSGRSANP (SEQ ID NO: 1101), and a combination of a variable heavy chain (VH) sequence of SEQ ID NO: 21 and a variable light chain (VL) sequence of SEQ ID NO: 47. In some embodiments, the combination further comprises a human immunoglobulin heavy chain constant region, a human immunoglobulin light chain constant domain, or both a human immunoglobulin heavy chain constant region and a human immunoglobulin light chain constant domain. In some embodiments, the human immunoglobulin heavy chain constant domain comprises an amino acid sequence selected from the group consisting of SEQ ID NO: 63, 381, 382, 383, and 1807. In some embodiments, the human immunoglobulin light chain constant domain is a human kappa constant domain comprising SEQ ID NO: 61 or SEQ ID NO: 1344.

[0208] In some embodiments, the activatable antibody comprises a masking moiety (MM) comprising the amino acid sequence TSYCSIEHYPCNTHH (SEQ ID NO: 99), which is referred to herein as mask PD034 or PD34, a cleavable moiety (CM) comprising the amino acid sequence ISSGLLSGRSDNP (SEQ ID NO: 1100), which is also referred to herein as substrate 2011, and a combination of a VH CDR1 sequence, a VH CDR2 sequence, a VH CDR3 sequence, a VL CDR1 sequence, a VL CDR2 sequence, and a VL CDR3 sequence, wherein the combination comprises the VH CDR sequences of the variable heavy chain sequence of SEQ ID NO: 21 and the VL CDR sequences of the variable light chain sequence of SEQ ID NO: 47. In some embodiments, the combination further comprises a human immunoglobulin heavy chain constant region, or both a human immunoglobulin heavy chain constant region and a human immunoglobulin light chain constant domain. In some embodiments, the human immunoglobulin heavy chain constant domain comprises an amino acid sequence selected from the group consisting of SEQ ID NO: 63, 381, 382, 383, and 1807. In some embodiments, the human immunoglobulin light chain constant domain is a human kappa constant domain comprising SEQ ID NO: 61 or SEQ ID NO: 1344.

[0209] In some embodiments, the activatable antibody comprises a masking moiety (MM) comprising the amino acid sequence TSYCSIEHYPCNTHH (SEQ ID NO: 99), a cleavable moiety (CM) comprising the amino acid sequence ISSGLLSGRSDNP (SEQ ID NO: 1100), and a combination of a VH CDR1 sequence, a VH CDR2 sequence, a VH CDR3 sequence, a VL CDR1 sequence, a VL CDR2 sequence, and a VL CDR3 sequence, wherein the combination comprises the VL CDR1 sequence of SEQ ID NO: 676; the VL CDR2 sequence of SEQ ID NO: 678; the VL CDR3 sequence of SEQ ID NO: 683; the VH CDR1 sequence of SEQ ID NO: 653; the VH CDR2 sequence of SEQ ID NO: 658; and the VH CDR3 sequence of SEQ ID NO: 664. In some embodiments, the combination further comprises a human immunoglobulin heavy chain constant region, a human immunoglobulin light chain constant domain, or both a human immunoglobulin heavy chain constant region and a human immunoglobulin light chain constant domain. In some embodiments, the human immunoglobulin heavy chain constant domain comprises an amino acid sequence selected from the group consisting of SEQ ID NO: 63, 381, 382, 383, and 1807. In some embodiments, the human immunoglobulin light chain constant domain is a human kappa constant domain comprising SEQ ID NO: 61 or SEQ ID NO: 1344.

[0210] In some embodiments, the activatable antibody comprises a masking moiety (MM) comprising the amino acid sequence TSYCSIEHYPCNTHH (SEQ ID NO: 99), a cleavable moiety (CM) comprising the amino acid sequence ISSGLLSGRSDNP (SEQ ID NO: 1100), and a combination of a variable heavy chain (VH) sequence of SEQ ID NO: 21 and a variable light chain (VL) sequence of SEQ ID NO: 47. In some embodiments, the combination further comprises a human immunoglobulin heavy chain constant region, a human immunoglobulin light chain constant domain, or both a human immunoglobulin heavy chain constant region and a human immunoglobulin light chain constant domain. In some embodiments, the human immunoglobulin heavy chain constant domain comprises an amino acid sequence selected from the group consisting of SEQ ID NO: 63, 381, 382, 383, and 1807. In some embodiments, the human immunoglobulin light chain constant domain is a human kappa constant domain comprising SEQ ID NO: 61 or SEQ ID NO: 1344.

[0211] In some embodiments, the activatable antibody comprises a masking moiety (MM) comprising the amino acid sequence TSYCSIEHYPCNTHH (SEQ ID NO: 99), which is referred to herein as mask PD034 or PD34, a cleavable moiety (CM) comprising the amino acid sequence ISSGLLSGRSDNH (SEQ ID NO: 214), which is also referred to herein as substrate 2001, and a combination of a VH CDR1 sequence, a VH CDR2 sequence, a VH CDR3 sequence, a VL CDR1 sequence, a VL CDR2 sequence, and a VL CDR3 sequence, wherein the combination comprises the VH CDR sequences of the variable heavy chain sequence of SEQ ID NO: 21 and the VL CDR sequences of the variable light chain sequence of SEQ ID NO: 47. In some embodiments, the combination further comprises a human immunoglobulin heavy chain constant region, a human immunoglobulin light chain constant domain, or both a human immunoglobulin heavy chain constant region and a human immunoglobulin light chain constant domain. In some embodiments, the human immunoglobulin heavy chain constant domain comprises an amino acid sequence selected from the group consisting of SEQ ID NO: 63, 381, 382, 383, and 1807. In some embodiments, the human immunoglobulin light chain constant domain is a human kappa constant domain comprising SEQ ID NO: 61 or SEQ ID NO: 1344.

[0212] In some embodiments, the activatable antibody comprises a masking moiety (MM) comprising the amino acid sequence TSYCSIEHYPCNTHH (SEQ ID NO: 99), a cleavable moiety (CM) comprising the amino acid sequence ISSGLLSGRSDNH (SEQ ID NO: 214), and a combination of a VH CDR1 sequence, a VH CDR2 sequence, a VH CDR3 sequence, a VL CDR1 sequence, a VL CDR2 sequence, and a VL CDR3 sequence, wherein the combination comprises the VL CDR1 sequence of SEQ ID NO: 676; the VL CDR2 sequence of SEQ ID NO: 678; the VL CDR3 sequence of SEQ ID NO: 683; the VH CDR1 sequence of SEQ ID NO: 653; the VH CDR2 sequence of SEQ ID NO: 658; and the VH CDR3 sequence of SEQ ID NO: 664. In some embodiments, the combination further comprises a human immunoglobulin heavy chain constant region, a human immunoglobulin light chain constant domain, or both a human immunoglobulin heavy chain constant region and a human immunoglobulin light chain constant domain. In some embodiments, the human immunoglobulin heavy chain constant domain comprises an amino acid sequence selected from the group consisting of SEQ ID NO: 63, 381, 382, 383, and 1807. In some embodiments, the human immunoglobulin light chain constant domain is a human kappa constant domain comprising SEQ ID NO: 61 or SEQ ID NO: 1344.

[0213] In some embodiments, the activatable antibody comprises a masking moiety (MM) comprising the amino acid sequence TSYCSIEHYPCNTHH (SEQ ID NO: 99), a cleavable moiety (CM) comprising the amino acid sequence ISSGLLSGRSDNH (SEQ ID NO: 214), and a combination of a variable heavy chain (VH) sequence of SEQ ID NO: 21 and a variable light chain (VL) sequence of SEQ ID NO: 47. In some embodiments, the combination further comprises a human immunoglobulin heavy chain constant region, a human immunoglobulin light chain constant domain, or both a human immunoglobulin heavy chain constant region and a human immunoglobulin light chain constant domain. In some embodiments, the human immunoglobulin heavy chain constant domain comprises an amino acid sequence selected from the group consisting of SEQ ID NO: 63, 381, 382, 383, and 1807. In some embodiments, the human immunoglobulin light chain constant domain is a human kappa constant domain comprising SEQ ID NO: 61 or SEQ ID NO: 1344.

[0214] In some embodiments, the activatable antibody comprises a masking moiety (MM) comprising the amino acid sequence TSYCSIEHYPCNTHH (SEQ ID NO: 99), a cleavable moiety (CM) comprising the amino acid sequence ISSGLLSGRSGNH (SEQ ID NO: 361), which is also referred to herein as substrate 2002, and a combination selected from the group consisting of (a) a combination of a VH CDR1 sequence, a VH CDR2 sequence, a VH CDR3 sequence, a VL CDR1 sequence, a VL CDR2 sequence, and a VL CDR3 sequence, wherein the combination comprises the VH CDR sequences of the variable heavy chain sequence of SEQ ID NO: 21 and the VL CDR sequences of the variable light chain sequence of SEQ ID NO: 47; (b) a combination of a VH CDR1 sequence, a VH CDR2 sequence, a VH CDR3 sequence, a VL CDR1 sequence, a VL CDR2 sequence, and a VL CDR3 sequence, wherein the combination comprises the VL CDR1 sequence of SEQ ID NO: 676; the VL CDR2 sequence of SEQ ID NO: 678; the VL CDR3 sequence of SEQ ID NO: 683; the VH CDR1 sequence of SEQ ID NO: 653; the VH CDR2 sequence of SEQ ID NO: 658; and the VH CDR3 sequence of SEQ ID NO: 664; and (c) a combination of a variable heavy chain (VH) sequence of SEQ ID NO: 21 and a variable light chain (VL) sequence of SEQ ID NO: 47. In some embodiments, the combination further comprises a human immunoglobulin heavy chain constant region, a human immunoglobulin light chain constant domain, or both a human immunoglobulin heavy chain constant region and a human immunoglobulin light chain constant domain. In some embodiments, the human immunoglobulin heavy chain constant domain comprises an amino acid sequence selected from the group consisting of SEQ ID NO: 63, 381, 382, 383, and 1807. In some embodiments, the human immunoglobulin light chain constant domain is a human kappa constant domain comprising SEQ ID NO: 61 or SEQ ID NO: 1344.

[0215] In some embodiments, the activatable antibody comprises a masking moiety (MM) comprising the amino acid sequence TSYCSIEHYPCNTHH (SEQ ID NO: 99), a cleavable moiety (CM) comprising the amino acid sequence ISSGLLSGRSANPRG (SEQ ID NO: 1092), which is also referred to herein as substrate 2003, and a combination selected from the group consisting of (a) a combination of a VH CDR1 sequence, a VH CDR2 sequence, a VH CDR3 sequence, a VL CDR1 sequence, a VL CDR2 sequence, and a VL CDR3 sequence, wherein the combination comprises the VH CDR sequences of the variable heavy chain sequence of SEQ ID NO: 21 and the VL CDR sequences of the variable light chain sequence of SEQ ID NO: 47; (b) a combination of a VH CDR1 sequence, a VH CDR2 sequence, a VH CDR3 sequence, a VL CDR1 sequence, a VL CDR2 sequence, and a VL CDR3 sequence, wherein the combination comprises the VL CDR1 sequence of SEQ ID NO: 676; the VL CDR2 sequence of SEQ ID NO: 678; the VL CDR3 sequence of SEQ ID NO: 683; the VH CDR1 sequence of SEQ ID NO: 653; the VH CDR2 sequence of SEQ ID NO: 658; and the VH CDR3 sequence of SEQ ID NO: 664; and (c) a combination of a variable heavy chain (VH) sequence of SEQ ID NO: 21 and a variable light chain (VL) sequence of SEQ ID NO: 47. In some embodiments, the combination further comprises a human immunoglobulin heavy chain constant region, a human immunoglobulin light chain constant domain, or both a human immunoglobulin heavy chain constant region and a human immunoglobulin light chain constant domain. In some embodiments, the human immunoglobulin heavy chain constant domain comprises an amino acid sequence selected from the group consisting of SEQ ID NO: 63, 381, 382, 383, and 1807. In some embodiments, the human immunoglobulin light chain constant domain is a human kappa constant domain comprising SEQ ID NO: 61 or SEQ ID NO: 1344.

[0216] In some embodiments, the activatable antibody comprises a masking moiety (MM) comprising the amino acid sequence TSYCSIEHYPCNTHH (SEQ ID NO: 99), a cleavable moiety (CM) comprising the amino acid sequence ISSGLLSGRSDDH (SEQ ID NO: 1095), which is also referred to herein as substrate 2006, and a combination selected from the group consisting of (a) a combination of a VH CDR1 sequence, a VH CDR2 sequence, a VH CDR3 sequence, a VL CDR1 sequence, a VL CDR2 sequence, and a VL CDR3 sequence, wherein the combination comprises the VH CDR sequences of the variable heavy chain sequence of SEQ ID NO: 21 and the VL CDR sequences of the variable light chain sequence of SEQ ID NO: 47; (b) a combination of a VH CDR1 sequence, a VH CDR2 sequence, a VH CDR3 sequence, a VL CDR1 sequence, a VL CDR2 sequence, and a VL CDR3 sequence, wherein the combination comprises the VL CDR1 sequence of SEQ ID NO: 676; the VL CDR2 sequence of SEQ ID NO: 678; the VL CDR3 sequence of SEQ ID NO: 683; the VH CDR1 sequence of SEQ ID NO: 653; the VH CDR2 sequence of SEQ ID NO: 658; and the VH CDR3 sequence of SEQ ID NO: 664; and (c) a combination of a variable heavy chain (VH) sequence of SEQ ID NO: 21 and a variable light chain (VL) sequence of SEQ ID NO: 47. In some embodiments, the combination further comprises a human immunoglobulin heavy chain constant region, a human immunoglobulin light chain constant domain, or both a human immunoglobulin heavy chain constant region and a human immunoglobulin light chain constant domain. In some embodiments, the human immunoglobulin heavy chain constant domain comprises an amino acid sequence selected from the group consisting of SEQ ID NO: 63, 381, 382, 383, and 1807. In some embodiments, the human immunoglobulin light chain constant domain is a human kappa constant domain comprising SEQ ID NO: 61 or SEQ ID NO: 1344.

[0217] In some embodiments, the activatable antibody comprises a masking moiety (MM) comprising the amino acid sequence TSYCSIEHYPCNTHH (SEQ ID NO: 99), a cleavable moiety (CM) comprising the amino acid sequence ISSGLLSGRSDIH (SEQ ID NO: 1096), which is also referred to herein as substrate 2007, and a combination selected from the group consisting of (a) a combination of a VH CDR1 sequence, a VH CDR2 sequence, a VH CDR3 sequence, a VL CDR1 sequence, a VL CDR2 sequence, and a VL CDR3 sequence, wherein the combination comprises the VH CDR sequences of the variable heavy chain sequence of SEQ ID NO: 21 and the VL CDR sequences of the variable light chain sequence of SEQ ID NO: 47; (b) a combination of a VH CDR1 sequence, a VH CDR2 sequence, a VH CDR3 sequence, a VL CDR1 sequence, a VL CDR2 sequence, and a VL CDR3 sequence, wherein the combination comprises the VL CDR1 sequence of SEQ ID NO: 676; the VL CDR2 sequence of SEQ ID NO: 678; the VL CDR3 sequence of SEQ ID NO: 683; the VH CDR1 sequence of SEQ ID NO: 653; the VH CDR2 sequence of SEQ ID NO: 658; and the VH CDR3 sequence of SEQ ID NO: 664; and (c) a combination of a variable heavy chain (VH) sequence of SEQ ID NO: 21 and a variable light chain (VL) sequence of SEQ ID NO: 47. In some embodiments, the combination further comprises a human immunoglobulin heavy chain constant region, a human immunoglobulin light chain constant domain, or both a human immunoglobulin heavy chain constant region and a human immunoglobulin light chain constant domain. In some embodiments, the human immunoglobulin heavy chain constant domain comprises an amino acid sequence selected from the group consisting of SEQ ID NO: 63, 381, 382, 383, and 1807. In some embodiments, the human immunoglobulin light chain constant domain is a human kappa constant domain comprising SEQ ID NO: 61 or SEQ ID NO: 1344.

[0218] In some embodiments, the activatable antibody comprises a masking moiety (MM) comprising the amino acid sequence TSYCSIEHYPCNTHH (SEQ ID NO: 99), a cleavable moiety (CM) comprising the amino acid sequence ISSGLLSGRSDQH (SEQ ID NO: 1097), which is also referred to herein as 2008, and a combination selected from the group consisting of (a) a combination of a VH CDR1 sequence, a VH CDR2 sequence, a VH CDR3 sequence, a VL CDR1 sequence, a VL CDR2 sequence, and a VL CDR3 sequence, wherein the combination comprises the VH CDR sequences of the variable heavy chain sequence of SEQ ID NO: 21 and the VL CDR sequences of the variable light chain sequence of SEQ ID NO: 47; (b) a combination of a VH CDR1 sequence, a VH CDR2 sequence, a VH CDR3 sequence, a VL CDR1 sequence, a VL CDR2 sequence, and a VL CDR3 sequence, wherein the combination comprises the VL CDR1 sequence of SEQ ID NO: 676; the VL CDR2 sequence of SEQ ID NO: 678; the VL CDR3 sequence of SEQ ID NO: 683; the VH CDR1 sequence of SEQ ID NO: 653; the VH CDR2 sequence of SEQ ID NO: 658; and the VH CDR3 sequence of SEQ ID NO: 664; and (c) a combination of a variable heavy chain (VH) sequence of SEQ ID NO: 21 and a variable light chain (VL) sequence of SEQ ID NO: 47. In some embodiments, the combination further comprises a human immunoglobulin heavy chain constant region, a human immunoglobulin light chain constant domain, or both a human immunoglobulin heavy chain constant region and a human immunoglobulin light chain constant domain. In some embodiments, the human immunoglobulin heavy chain constant domain comprises an amino acid sequence selected from the group consisting of SEQ ID NO: 63, 381, 382, 383, and 1807. In some embodiments, the human immunoglobulin light chain constant domain is a human kappa constant domain comprising SEQ ID NO: 61 or SEQ ID NO: 1344.

[0219] In some embodiments, the activatable antibody comprises a masking moiety (MM) comprising the amino acid sequence TSYCSIEHYPCNTHH (SEQ ID NO: 99), a cleavable moiety (CM) comprising the amino acid sequence ISSGLLSGRSDTH (SEQ ID NO: 1098), which is also referred to herein as substrate 2009, and a combination selected from the group consisting of (a) a combination of a VH CDR1 sequence, a VH CDR2 sequence, a VH CDR3 sequence, a VL CDR1 sequence, a VL CDR2 sequence, and a VL CDR3 sequence, wherein the combination comprises the VH CDR sequences of the variable heavy chain sequence of SEQ ID NO: 21 and the VL CDR sequences of the variable light chain sequence of SEQ ID NO: 47; (b) a combination of a VH CDR1 sequence, a VH CDR2 sequence, a VH CDR3 sequence, a VL CDR1 sequence, a VL CDR2 sequence, and a VL CDR3 sequence, wherein the combination comprises the VL CDR1 sequence of SEQ ID NO: 676; the VL CDR2 sequence of SEQ ID NO: 678; the VL CDR3 sequence of SEQ ID NO: 683; the VH CDR1 sequence of SEQ ID NO: 653; the VH CDR2 sequence of SEQ ID NO: 658; and the VH CDR3 sequence of SEQ ID NO: 664; and (c) a combination of a variable heavy chain (VH) sequence of SEQ ID NO: 21 and a variable light chain (VL) sequence of SEQ ID NO: 47. In some embodiments, the combination further comprises a human immunoglobulin heavy chain constant region, a human immunoglobulin light chain constant domain, or both a human immunoglobulin heavy chain constant region and a human immunoglobulin light chain constant domain. In some embodiments, the human immunoglobulin heavy chain constant domain comprises an amino acid sequence selected from the group consisting of SEQ ID NO: 63, 381, 382, 383, and 1807. In some embodiments, the human immunoglobulin light chain constant domain is a human kappa constant domain comprising SEQ ID NO: 61 or SEQ ID NO: 1344.

[0220] In some embodiments, the activatable antibody comprises a masking moiety (MM) comprising the amino acid sequence TSYCSIEHYPCNTHH (SEQ ID NO: 99), a cleavable moiety (CM) comprising the amino acid sequence ISSGLLSGRSDYH (SEQ ID NO: 1099), which is also referred to herein as 2010, and a combination selected from the group consisting of (a) a combination of a VH CDR1 sequence, a VH CDR2 sequence, a VH CDR3 sequence, a VL CDR1 sequence, a VL CDR2 sequence, and a VL CDR3 sequence, wherein the combination comprises the VH CDR sequences of the variable heavy chain sequence of SEQ ID NO: 21 and the VL CDR sequences of the variable light chain sequence of SEQ ID NO: 47; (b) a combination of a VH CDR1 sequence, a VH CDR2 sequence, a VH CDR3 sequence, a VL CDR1 sequence, a VL CDR2 sequence, and a VL CDR3 sequence, wherein the combination comprises the VL CDR1 sequence of SEQ ID NO: 676; the VL CDR2 sequence of SEQ ID NO: 678; the VL CDR3 sequence of SEQ ID NO: 683; the VH CDR1 sequence of SEQ ID NO: 653; the VH CDR2 sequence of SEQ ID NO: 658; and the VH CDR3 sequence of SEQ ID NO: 664; and (c) a combination of a variable heavy chain (VH) sequence of SEQ ID NO: 21 and a variable light chain (VL) sequence of SEQ ID NO: 47. In some embodiments, the combination further comprises a human immunoglobulin heavy chain constant region, a human immunoglobulin light chain constant domain, or both a human immunoglobulin heavy chain constant region and a human immunoglobulin light chain constant domain. In some embodiments, the human immunoglobulin heavy chain constant domain comprises an amino acid sequence selected from the group consisting of SEQ ID NO: 63, 381, 382, 383, and 1807. In some embodiments, the human immunoglobulin light chain constant domain is a human kappa constant domain comprising SEQ ID NO: 61 or SEQ ID NO: 1344.

[0221] In some embodiments, the activatable antibody comprises a masking moiety (MM) comprising the amino acid sequence TSYCSIEHYPCNTHH (SEQ ID NO: 99), a cleavable moiety (CM) comprising the amino acid sequence ISSGLLSGRSANI (SEQ ID NO: 1102), which is also referred to herein as substrate 2013, and a combination selected from the group consisting of (a) a combination of a VH CDR1 sequence, a VH CDR2 sequence, a VH CDR3 sequence, a VL CDR1 sequence, a VL CDR2 sequence, and a VL CDR3 sequence, wherein the combination comprises the VH CDR sequences of the variable heavy chain sequence of SEQ ID NO: 21 and the VL CDR sequences of the variable light chain sequence of SEQ ID NO: 47; (b) a combination of a VH CDR1 sequence, a VH CDR2 sequence, a VH CDR3 sequence, a VL CDR1 sequence, a VL CDR2 sequence, and a VL CDR3 sequence, wherein the combination comprises the VL CDR1 sequence of SEQ ID NO: 676; the VL CDR2 sequence of SEQ ID NO: 678; the VL CDR3 sequence of SEQ ID NO: 683; the VH CDR1 sequence of SEQ ID NO: 653; the VH CDR2 sequence of SEQ ID NO: 658; and the VH CDR3 sequence of SEQ ID NO: 664; and (c) a combination of a variable heavy chain (VH) sequence of SEQ ID NO: 21 and a variable light chain (VL) sequence of SEQ ID NO: 47. In some embodiments, the combination further comprises a human immunoglobulin heavy chain constant region, a human immunoglobulin light chain constant domain, or both a human immunoglobulin heavy chain constant region and a human immunoglobulin light chain constant domain. In some embodiments, the human immunoglobulin heavy chain constant domain comprises an amino acid sequence selected from the group consisting of SEQ ID NO: 63, 381, 382, 383, and 1807. In some embodiments, the human immunoglobulin light chain constant domain is a human kappa constant domain comprising SEQ ID NO: 61 or SEQ ID NO: 1344.

[0222] In some embodiments, the activatable antibody comprises a masking moiety (MM) comprising the amino acid sequence TSYCSIEHYPCNTHH (SEQ ID NO: 99), a cleavable moiety (CM) comprising the amino acid sequence ISSGLLSGRSDNI (SEQ ID NO: 1111), which is also referred to herein as substrate 2014, and a combination selected from the group consisting of (a) a combination of a VH CDR1 sequence, a VH CDR2 sequence, a VH CDR3 sequence, a VL CDR1 sequence, a VL CDR2 sequence, and a VL CDR3 sequence, wherein the combination comprises the VH CDR sequences of the variable heavy chain sequence of SEQ ID NO: 21 and the VL CDR sequences of the variable light chain sequence of SEQ ID NO: 47; (b) a combination of a VH CDR1 sequence, a VH CDR2 sequence, a VH CDR3 sequence, a VL CDR1 sequence, a VL CDR2 sequence, and a VL CDR3 sequence, wherein the combination comprises the VL CDR1 sequence of SEQ ID NO: 676; the VL CDR2 sequence of SEQ ID NO: 678; the VL CDR3 sequence of SEQ ID NO: 683; the VH CDR1 sequence of SEQ ID NO: 653; the VH CDR2 sequence of SEQ ID NO: 658; and the VH CDR3 sequence of SEQ ID NO: 664; and (c) a combination of a variable heavy chain (VH) sequence of SEQ ID NO: 21 and a variable light chain (VL) sequence of SEQ ID NO: 47. In some embodiments, the combination further comprises a human immunoglobulin heavy chain constant region, a human immunoglobulin light chain constant domain, or both a human immunoglobulin heavy chain constant region and a human immunoglobulin light chain constant domain. In some embodiments, the human immunoglobulin heavy chain constant domain comprises an amino acid sequence selected from the group consisting of SEQ ID NO: 63, 381, 382, 383, and 1807. In some embodiments, the human immunoglobulin light chain constant domain is a human kappa constant domain comprising SEQ ID NO: 61 or SEQ ID NO: 1344.

[0223] In some embodiments, the activatable antibody comprises a light chain comprising the amino acid sequence of SEQ ID NO: 1151; and a heavy chain comprising the amino acid sequence of SEQ ID NO:21.

[0224] In some embodiments, the activatable antibody comprises a light chain comprising the amino acid sequence of SEQ ID NO: 1152; and a heavy chain comprising the amino acid sequence of SEQ ID NO:21.

[0225] In some embodiments, the activatable antibody comprises a light chain comprising the amino acid sequence of SEQ ID NO: 1190; and a heavy chain comprising the amino acid sequence of SEQ ID NO:21.

[0226] In some embodiments, the activatable antibody comprises a light chain comprising the amino acid sequence of SEQ ID NO: 1191; and a heavy chain comprising the amino acid sequence of SEQ ID NO:21.

[0227] In some embodiments, the activatable antibody comprises a light chain comprising the amino acid sequence of SEQ ID NO: 1198; and a heavy chain comprising the amino acid sequence of SEQ ID NO:21.

[0228] In some embodiments, the activatable antibody comprises a light chain comprising the amino acid sequence of SEQ ID NO: 1199; and a heavy chain comprising the amino acid sequence of SEQ ID NO:21.

[0229] In some embodiments, the activatable antibody comprises a light chain comprising the amino acid sequence of SEQ ID NO: 2055; and a heavy chain comprising the amino acid sequence of SEQ ID NO: 2052.

[0230] In some embodiments, the activatable antibody comprises a light chain comprising the amino acid sequence of SEQ ID NO: 2054; and a heavy chain comprising the amino acid sequence of SEQ ID NO: 2052.

[0231] In some embodiments, the activatable antibody comprises a light chain comprising the amino acid sequence of SEQ ID NO: 2057; and a heavy chain comprising the amino acid sequence of SEQ ID NO: 2052.

[0232] In some embodiments, the activatable antibody comprises a light chain comprising the amino acid sequence of SEQ ID NO: 2056; and a heavy chain comprising the amino acid sequence of SEQ ID NO: 2052.

[0233] In some embodiments, the activatable antibody comprises a light chain comprising the amino acid sequence of SEQ ID NO: 2059; and a heavy chain comprising the amino acid sequence of SEQ ID NO: 2052.

[0234] In some embodiments, the activatable antibody comprises a light chain comprising the amino acid sequence of SEQ ID NO: 2058; and a heavy chain comprising the amino acid sequence of SEQ ID NO: 2052.

[0235] In some embodiments, the activatable antibody comprises a light chain comprising the amino acid sequence of SEQ ID NO: 2055; and a heavy chain comprising the amino acid sequence of SEQ ID NO: 2053.

[0236] In some embodiments, the activatable antibody comprises a light chain comprising the amino acid sequence of SEQ ID NO: 2054; and a heavy chain comprising the amino acid sequence of SEQ ID NO: 2053.

[0237] In some embodiments, the activatable antibody comprises a light chain comprising the amino acid sequence of SEQ ID NO: 2057; and a heavy chain comprising the amino acid sequence of SEQ ID NO: 2053.

[0238] In some embodiments, the activatable antibody comprises a light chain comprising the amino acid sequence of SEQ ID NO: 2056; and a heavy chain comprising the amino acid sequence of SEQ ID NO: 2053.

[0239] In some embodiments, the activatable antibody comprises a light chain comprising the amino acid sequence of SEQ ID NO: 2059; and a heavy chain comprising the amino acid sequence of SEQ ID NO: 2053.

[0240] In some embodiments, the activatable antibody comprises a light chain comprising the amino acid sequence of SEQ ID NO: 2058; and a heavy chain comprising the amino acid sequence of SEQ ID NO: 2053.

[0241] In some embodiments, the activatable antibody comprises a masking moiety (MM) comprising an amino acid sequence selected from the group consisting of SEQ ID NOs: 1351-1362; a cleavable moiety (CM) comprising an amino acid sequence selected from the group consisting of SEQ ID NOs: 214, 294, 300, 302, 303, 305, 308, 318, 347, 361, 1092-1102, 1111, and 1157; and a combination of a VH CDR1 sequence, a VH CDR2 sequence, a VH CDR3 sequence, a VL CDR1 sequence, a VL CDR2 sequence, and a VL CDR3 sequence, wherein the combination comprises the VH CDR sequences of the variable heavy chain sequence of SEQ ID NO: 1514 and the VL CDR sequences of the variable light chain sequence of SEQ ID NO: 638. In some embodiments, the combination further comprises a human immunoglobulin heavy chain constant region, a human immunoglobulin light chain constant domain, or both a human immunoglobulin heavy chain constant region and a human immunoglobulin light chain constant domain. In some embodiments, the human immunoglobulin heavy chain constant domain comprises an amino acid sequence selected from the group consisting of SEQ ID NO: 63, 381, 382, 383, and 1807. In some embodiments, the human immunoglobulin light chain constant domain is a human kappa constant domain comprising SEQ ID NO: 61 or SEQ ID NO: 1344.

[0242] In some embodiments, the activatable antibody comprises a MM comprising an amino acid sequence selected from the group consisting of SEQ ID NOs: 1351-1362; a CM comprising an amino acid sequence selected from the group consisting of SEQ ID NOs: 214, 294, 300, 302, 303, 305, 308, 318, 347, 361, 1092-1102, 1111, and 1157; and a combination of a VH CDR1 sequence, a VH CDR2 sequence, a VH CDR3 sequence, a VL CDR1 sequence, a VL CDR2 sequence, and a VL CDR3 sequence, wherein the VH CDR1 sequence comprises GYTFTNYY (SEQ ID NO: 1711); the VH CDR2 sequence comprises INPSNGGT (SEQ ID NO: 1712); the VH CDR3 sequence comprises RRDYRFDMGFDY (SEQ ID NO: 1713); the VL CDR1 sequence comprises KGVSTSGYSY (SEQ ID NO: 1714); the VL CDR2 sequence comprises LAS (SEQ ID NO: 1715); and the VL CDR3 sequence comprises QHSRDLPLT (SEQ ID NO: 1716). In some embodiments, the combination further comprises a human immunoglobulin heavy chain constant region, a human immunoglobulin light chain constant domain, or both a human immunoglobulin heavy chain constant region and a human immunoglobulin light chain constant domain. In some embodiments, the human immunoglobulin heavy chain constant domain comprises an amino acid sequence selected from the group consisting of SEQ ID NO: 63, 381, 382, 383, and 1807. In some embodiments, the human immunoglobulin light chain constant domain is a human kappa constant domain comprising SEQ ID NO: 61 or SEQ ID NO: 1344.

[0243] In some embodiments, the activatable antibody comprises a MM comprising an amino acid sequence selected from the group consisting of SEQ ID NOs: 1351-1362; a CM comprising an amino acid sequence selected from the group consisting of SEQ ID NOs: 214, 294, 300, 302, 303, 305, 308, 318, 347, 361, 1092-1102, 1111, and 1157; the VH sequence of SEQ ID NO: 1514 and the VL sequence of SEQ ID NO: 638. In some embodiments, the combination further comprises a human immunoglobulin heavy chain constant region, a human immunoglobulin light chain constant domain, or both a human immunoglobulin heavy chain constant region and a human immunoglobulin light chain constant domain. In some embodiments, the human immunoglobulin heavy chain constant domain comprises an amino acid sequence selected from the group consisting of SEQ ID NO: 63, 381, 382, 383, and 1807. In some embodiments, the human immunoglobulin light chain constant domain is a human kappa constant domain comprising SEQ ID NO: 61 or SEQ ID NO: 1344.

[0244] In some embodiments, the activatable antibody comprises a MM comprising an amino acid sequence selected from the group consisting of SEQ ID NOs: 1206-1217; a CM comprising an amino acid sequence selected from the group consisting of SEQ ID NOs: 214, 294, 300, 302, 303, 305, 308, 318, 347, 361, 1092-1102, 1111, and 1157; and a combination of a VH CDR1 sequence, a VH CDR2 sequence, a VH CDR3 sequence, a VL CDR1 sequence, a VL CDR2 sequence, and a VL CDR3 sequence, wherein the combination comprises the VH CDR sequences of the variable heavy chain sequence of SEQ ID NO: 1346 and the VL CDR sequences of the variable light chain sequence of SEQ ID NO: 626. In some embodiments, the combination further comprises a human immunoglobulin heavy chain constant region, or both a human immunoglobulin heavy chain constant region and a human immunoglobulin light chain constant domain. In some embodiments, the human immunoglobulin heavy chain constant domain comprises an amino acid sequence selected from the group consisting of SEQ ID NO: 63, 381, 382, 383, and 1807. In some embodiments, the human immunoglobulin light chain constant domain is a human kappa constant domain comprising SEQ ID NO: 61 or SEQ ID NO: 1344.

[0245] In some embodiments, the activatable antibody comprises a MM comprising an amino acid sequence selected from the group consisting of SEQ ID NOs: 1206-1217; a CM comprising an amino acid sequence selected from the group consisting of SEQ ID NOs: 214, 294, 300, 302, 303, 305, 308, 318, 347, 361, 1092-1102, 1111, and 1157; and a combination of a VH CDR1 sequence, a VH CDR2 sequence, a VH CDR3 sequence, a VL CDR1 sequence, a VL CDR2 sequence, and a VL CDR3 sequence, wherein the VH CDR1 sequence comprises GITFSNSG (SEQ ID NO: 1705); the VH CDR2 sequence comprises IWYDGSKR (SEQ ID NO: 1706); the VH CDR3 sequence comprises TNDDY (SEQ ID NO: 1707); the VL CDR1 sequence comprises QSVSSY (SEQ ID NO: 1708); the VL CDR2 sequence comprises DAS (SEQ ID NO: 1709); and the VL CDR3 sequence comprises QQSSNWPRT (SEQ ID NO: 1710). In some embodiments, the combination further comprises a human immunoglobulin heavy chain constant region, a human immunoglobulin light chain constant domain, or both a human immunoglobulin heavy chain constant region and a human immunoglobulin light chain constant domain. In some embodiments, the human immunoglobulin heavy chain constant domain comprises an amino acid sequence selected from the group consisting of SEQ ID NO: 63, 381, 382, 383, and 1807. In some embodiments, the human immunoglobulin light chain constant domain is a human kappa constant domain comprising SEQ ID NO: 61 or SEQ ID NO: 1344.

[0246] In some embodiments, the activatable antibody comprises a MM comprising an amino acid sequence selected from the group consisting of SEQ ID NOs: 1206-1217; a CM comprising an amino acid sequence selected from the group consisting of SEQ ID NOs: 214, 294, 300, 302, 303, 305, 308, 318, 347, 361, 1092-1102, 1111, and 1157; the VH sequence of SEQ ID NO: 1346 and the VL sequence of SEQ ID NO: 626. In some embodiments, the combination further comprises a human immunoglobulin heavy chain constant region, a human immunoglobulin light chain constant domain, or both a human immunoglobulin heavy chain constant region and a human immunoglobulin light chain constant domain. In some embodiments, the human immunoglobulin heavy chain constant domain comprises an amino acid sequence selected from the group consisting of SEQ ID NO: 63, 381, 382, 383, and 1807. In some embodiments, the human immunoglobulin light chain constant domain is a human kappa constant domain comprising SEQ ID NO: 61 or SEQ ID NO: 1344.

[0247] In some embodiments, the activatable antibody comprises a MM comprising the amino acid sequence ACRICQDHPATKWNS (SEQ ID NO: 549), a CM comprising the amino acid sequence ISSGLLSGRSANP (SEQ ID NO: 1101), which is also referred to herein as substrate 2012; the heavy chain (HC) sequence of SEQ ID NO: 546, and the light chain (LC) sequence of SEQ ID NO: 543.

[0248] In some embodiments, the activatable antibody comprises a MM comprising the amino acid sequence ACRICQDHPATKWNS (SEQ ID NO: 549), a CM comprising the amino acid sequence ISSGLLSGRSDNP (SEQ ID NO: 1100), which is also referred to herein as substrate 2011; the heavy chain (HC) sequence of SEQ ID NO: 546, and the light chain (LC) sequence of SEQ ID NO: 543.

[0249] In some embodiments, the activatable antibody comprises a MM comprising the amino acid sequence ACRICQDHPATKWNS (SEQ ID NO: 549), a CM comprising the amino acid sequence ISSGLLSGRSDNH (SEQ ID NO: 214), which is also referred to herein as substrate 2001; the heavy chain (HC) sequence of SEQ ID NO: 546, and the light chain (LC) sequence of SEQ ID NO: 543.

[0250] In some embodiments, the activatable antibody comprises a MM comprising the amino acid sequence ACRICQDHPATKWNS (SEQ ID NO: 549), a CM comprising the amino acid sequence ISSGLLSGRSGNH (SEQ ID NO: 361), which is also referred to herein as substrate 2002; the heavy chain (HC) sequence of SEQ ID NO: 546, and the light chain (LC) sequence of SEQ ID NO: 543.

[0251] In some embodiments, the activatable antibody comprises a MM comprising the amino acid sequence ACRICQDHPATKWNS (SEQ ID NO: 549), a CM comprising the amino acid sequence ISSGLLSGRSANPRG (SEQ ID NO: 1092), which is also referred to herein as substrate 2003; the heavy chain (HC) sequence of SEQ ID NO: 546, and the light chain (LC) sequence of SEQ ID NO: 543.

[0252] In some embodiments, the activatable antibody comprises a MM comprising the amino acid sequence ACRICQDHPATKWNS (SEQ ID NO: 549), a CM comprising the amino acid sequence ISSGLLSGRSDDH (SEQ ID NO: 1095), which is also referred to herein as substrate 2006; the heavy chain (HC) sequence of SEQ ID NO: 546, and the light chain (LC) sequence of SEQ ID NO: 543.

[0253] In some embodiments, the activatable antibody comprises a MM comprising the amino acid sequence ACRICQDHPATKWNS (SEQ ID NO: 549), a CM comprising the amino acid sequence ISSGLLSGRSDIH (SEQ ID NO: 1096), which is also referred to herein as substrate 2007; the heavy chain (HC) sequence of SEQ ID NO: 546, and the light chain (LC) sequence of SEQ ID NO: 543.

[0254] In some embodiments, the activatable antibody comprises a MM comprising the amino acid sequence ACRICQDHPATKWNS (SEQ ID NO: 549), a CM comprising the amino acid sequence ISSGLLSGRSDQH (SEQ ID NO: 1097), which is also referred to herein as substrate 2008; the heavy chain (HC) sequence of SEQ ID NO: 546, and the light chain (LC) sequence of SEQ ID NO: 543.

[0255] In some embodiments, the activatable antibody comprises a MM comprising the amino acid sequence ACRICQDHPATKWNS (SEQ ID NO: 549), a CM comprising the amino acid sequence ISSGLLSGRSDTH (SEQ ID NO: 1098), which is also referred to herein as substrate 2009; the heavy chain (HC) sequence of SEQ ID NO: 546, and the light chain (LC) sequence of SEQ ID NO: 543.

[0256] In some embodiments, the activatable antibody comprises a MM comprising the amino acid sequence ACRICQDHPATKWNS (SEQ ID NO: 549), a CM comprising the amino acid sequence ISSGLLSGRSDYH (SEQ ID NO: 1099), which is also referred to herein as substrate 2010; the heavy chain (HC) sequence of SEQ ID NO: 546, and the light chain (LC) sequence of SEQ ID NO: 543.

[0257] In some embodiments, the activatable antibody comprises a MM comprising the amino acid sequence ACRICQDHPATKWNS (SEQ ID NO: 549), a CM comprising the amino acid sequence ISSGLLSGRSANI (SEQ ID NO: 1102), which is also referred to herein as substrate 2013; the heavy chain (HC) sequence of SEQ ID NO: 546, and the light chain (LC) sequence of SEQ ID NO: 543.

[0258] In some embodiments, the activatable antibody comprises a MM comprising the amino acid sequence ACRICQDHPATKWNS (SEQ ID NO: 549), a CM comprising the amino acid sequence ISSGLLSGRSDNI (SEQ ID NO: 1111), which is also referred to herein as substrate 2014; the heavy chain (HC) sequence of SEQ ID NO: 546, and the light chain (LC) sequence of SEQ ID NO: 543.

[0259] In some embodiments, the activatable antibody comprises a MM comprising the amino acid sequence ACRICQDHPATKWNS (SEQ ID NO: 549), a CM comprising the amino acid sequence ISSGLLSGRSANP (SEQ ID NO: 1101), which is also referred to herein as substrate 2012; the variable heavy chain region (VH) of the heavy chain (HC) sequence of SEQ ID NO: 546, and the variable light chain region (VL) of the light chain (LC) sequence of SEQ ID NO: 543.

[0260] In some embodiments, the activatable antibody comprises a MM comprising the amino acid sequence ACRICQDHPATKWNS (SEQ ID NO: 549), a CM comprising the amino acid sequence ISSGLLSGRSDNP (SEQ ID NO: 1100), which is also referred to herein as substrate 2011; the variable heavy chain region (VH) of the heavy chain (HC) sequence of SEQ ID NO: 546, and the variable light chain region (VL) of the light chain (LC) sequence of SEQ ID NO: 543.

[0261] In some embodiments, the activatable antibody comprises a MM comprising the amino acid sequence ACRICQDHPATKWNS (SEQ ID NO: 549), a CM comprising the amino acid sequence ISSGLLSGRSDNH (SEQ ID NO: 214), which is also referred to herein as substrate 2001; the variable heavy chain region (VH) of the heavy chain (HC) sequence of SEQ ID NO: 546, and the variable light chain region (VL) of the light chain (LC) sequence of SEQ ID NO: 543.

[0262] In some embodiments, the activatable antibody comprises a MM comprising the amino acid sequence ACRICQDHPATKWNS (SEQ ID NO: 549), a CM comprising the amino acid sequence ISSGLLSGRSGNH (SEQ ID NO: 361), which is also referred to herein as substrate 2002; the variable heavy chain region (VH) of the heavy chain (HC) sequence of SEQ ID NO: 546, and the variable light chain region (VL) of the light chain (LC) sequence of SEQ ID NO: 543.

[0263] In some embodiments, the activatable antibody comprises a MM comprising the amino acid sequence ACRICQDHPATKWNS (SEQ ID NO: 549), a CM comprising the amino acid sequence ISSGLLSGRSANPRG (SEQ ID NO: 1092), which is also referred to herein as substrate 2003; the variable heavy chain region (VH) of the heavy chain (HC) sequence of SEQ ID NO: 546, and the variable light chain region (VL) of the light chain (LC) sequence of SEQ ID NO: 543.

[0264] In some embodiments, the activatable antibody comprises a MM comprising the amino acid sequence ACRICQDHPATKWNS (SEQ ID NO: 549), a CM comprising the amino acid sequence ISSGLLSGRSDDH (SEQ ID NO: 1095), which is also referred to herein as substrate 2006; the variable heavy chain region (VH) of the heavy chain (HC) sequence of SEQ ID NO: 546, and the variable light chain region (VL) of the light chain (LC) sequence of SEQ ID NO: 543.

[0265] In some embodiments, the activatable antibody comprises a MM comprising the amino acid sequence ACRICQDHPATKWNS (SEQ ID NO: 549), a CM comprising the amino acid sequence ISSGLLSGRSDIH (SEQ ID NO: 1096), which is also referred to herein as substrate 2007; the variable heavy chain region (VH) of the heavy chain (HC) sequence of SEQ ID NO: 546, and the variable light chain region (VL) of the light chain (LC) sequence of SEQ ID NO: 543.

[0266] In some embodiments, the activatable antibody comprises a MM comprising the amino acid sequence ACRICQDHPATKWNS (SEQ ID NO: 549), a CM comprising the amino acid sequence ISSGLLSGRSDQH (SEQ ID NO: 1097), which is also referred to herein as substrate 2008; the variable heavy chain region (VH) of the heavy chain (HC) sequence of SEQ ID NO: 546, and the variable light chain region (VL) of the light chain (LC) sequence of SEQ ID NO: 543.

[0267] In some embodiments, the activatable antibody comprises a MM comprising the amino acid sequence ACRICQDHPATKWNS (SEQ ID NO: 549), a CM comprising the amino acid sequence ISSGLLSGRSDTH (SEQ ID NO: 1098), which is also referred to herein as substrate 2009; the variable heavy chain region (VH) of the heavy chain (HC) sequence of SEQ ID NO: 546, and the variable light chain region (VL) of the light chain (LC) sequence of SEQ ID NO: 543.

[0268] In some embodiments, the activatable antibody comprises a MM comprising the amino acid sequence ACRICQDHPATKWNS (SEQ ID NO: 549), a CM comprising the amino acid sequence ISSGLLSGRSDYH (SEQ ID NO: 1099), which is also referred to herein as substrate 2010; the variable heavy chain region (VH) of the heavy chain (HC) sequence of SEQ ID NO: 546, and the variable light chain region (VL) of the light chain (LC) sequence of SEQ ID NO: 543.

[0269] In some embodiments, the activatable antibody comprises a MM comprising the amino acid sequence ACRICQDHPATKWNS (SEQ ID NO: 549), a CM comprising the amino acid sequence ISSGLLSGRSANI (SEQ ID NO: 1102), which is also referred to herein as substrate 2013; the variable heavy chain region (VH) of the heavy chain (HC) sequence of SEQ ID NO: 546, and the variable light chain region (VL) of the light chain (LC) sequence of SEQ ID NO: 543.

[0270] In some embodiments, the activatable antibody comprises a MM comprising the amino acid sequence ACRICQDHPATKWNS (SEQ ID NO: 549), a CM comprising the amino acid sequence ISSGLLSGRSDNI (SEQ ID NO: 1111), which is also referred to herein as substrate 2014; the variable heavy chain region (VH) of the heavy chain (HC) sequence of SEQ ID NO: 546, and the variable light chain region (VL) of the light chain (LC) sequence of SEQ ID NO: 543.

[0271] In some embodiments, the activatable antibody comprises a MM comprising the amino acid sequence ACRICQDHPATKWNS (SEQ ID NO: 549), a CM comprising the amino acid sequence ISSGLLSGRSANP (SEQ ID NO: 1101), which is also referred to herein as substrate 2012; the heavy chain complementarity determining regions (CDRs) of the heavy chain (HC) sequence of SEQ ID NO: 546, and the light chain complementarity determining regions (CDRs) of the light chain (LC) sequence of SEQ ID NO: 543.

[0272] In some embodiments, the activatable antibody comprises a MM comprising the amino acid sequence ACRICQDHPATKWNS (SEQ ID NO: 549), a CM comprising the amino acid sequence ISSGLLSGRSDNP (SEQ ID NO: 1100), which is also referred to herein as substrate 2011; the heavy chain complementarity determining regions (CDRs) of the heavy chain (HC) sequence of SEQ ID NO: 546, and the light chain complementarity determining regions (CDRs) of the light chain (LC) sequence of SEQ ID NO: 543.

[0273] In some embodiments, the activatable antibody comprises a MM comprising the amino acid sequence ACRICQDHPATKWNS (SEQ ID NO: 549), a CM comprising the amino acid sequence ISSGLLSGRSDNH (SEQ ID NO: 214), which is also referred to herein as substrate 2001; the heavy chain complementarity determining regions (CDRs) of the heavy chain (HC) sequence of SEQ ID NO: 546, and the light chain complementarity determining regions (CDRs) of the light chain (LC) sequence of SEQ ID NO: 543.

[0274] In some embodiments, the activatable antibody comprises a MM comprising the amino acid sequence ACRICQDHPATKWNS (SEQ ID NO: 549), a CM comprising the amino acid sequence ISSGLLSGRSGNH (SEQ ID NO: 361), which is also referred to herein as substrate 2002; the heavy chain complementarity determining regions (CDRs) of the heavy chain (HC) sequence of SEQ ID NO: 546, and the light chain complementarity determining regions (CDRs) of the light chain (LC) sequence of SEQ ID NO: 543.

[0275] In some embodiments, the activatable antibody comprises a MM comprising the amino acid sequence ACRICQDHPATKWNS (SEQ ID NO: 549), a CM comprising the amino acid sequence ISSGLLSGRSANPRG (SEQ ID NO: 1092), which is also referred to herein as substrate 2003; the heavy chain complementarity determining regions (CDRs) of the heavy chain (HC) sequence of SEQ ID NO: 546, and the light chain complementarity determining regions (CDRs) of the light chain (LC) sequence of SEQ ID NO: 543.

[0276] In some embodiments, the activatable antibody comprises a MM comprising the amino acid sequence ACRICQDHPATKWNS (SEQ ID NO: 549), a CM comprising the amino acid sequence ISSGLLSGRSDDH (SEQ ID NO: 1095), which is also referred to herein as substrate 2006; the heavy chain complementarity determining regions (CDRs) of the heavy chain (HC) sequence of SEQ ID NO: 546, and the light chain complementarity determining regions (CDRs) of the light chain (LC) sequence of SEQ ID NO: 543.

[0277] In some embodiments, the activatable antibody comprises a MM comprising the amino acid sequence ACRICQDHPATKWNS (SEQ ID NO: 549), a CM comprising the amino acid sequence ISSGLLSGRSDIH (SEQ ID NO: 1096), which is also referred to herein as substrate 2007; the heavy chain complementarity determining regions (CDRs) of the heavy chain (HC) sequence of SEQ ID NO: 546, and the light chain complementarity determining regions (CDRs) of the light chain (LC) sequence of SEQ ID NO: 543.

[0278] In some embodiments, the activatable antibody comprises a MM comprising the amino acid sequence ACRICQDHPATKWNS (SEQ ID NO: 549), a CM comprising the amino acid sequence ISSGLLSGRSDQH (SEQ ID NO: 1097), which is also referred to herein as substrate 2008; the heavy chain complementarity determining regions (CDRs) of the heavy chain (HC) sequence of SEQ ID NO: 546, and the light chain complementarity determining regions (CDRs) of the light chain (LC) sequence of SEQ ID NO: 543.

[0279] In some embodiments, the activatable antibody comprises a MM comprising the amino acid sequence ACRICQDHPATKWNS (SEQ ID NO: 549), a CM comprising the amino acid sequence ISSGLLSGRSDTH (SEQ ID NO: 1098), which is also referred to herein as substrate 2009; the heavy chain complementarity determining regions (CDRs) of the heavy chain (HC) sequence of SEQ ID NO: 546, and the light chain complementarity determining regions (CDRs) of the light chain (LC) sequence of SEQ ID NO: 543.

[0280] In some embodiments, the activatable antibody comprises a MM comprising the amino acid sequence ACRICQDHPATKWNS (SEQ ID NO: 549), a CM comprising the amino acid sequence ISSGLLSGRSDYH (SEQ ID NO: 1099), which is also referred to herein as substrate 2010; the heavy chain complementarity determining regions (CDRs) of the heavy chain (HC) sequence of SEQ ID NO: 546, and the light chain complementarity determining regions (CDRs) of the light chain (LC) sequence of SEQ ID NO: 543.

[0281] In some embodiments, the activatable antibody comprises a MM comprising the amino acid sequence ACRICQDHPATKWNS (SEQ ID NO: 549), a CM comprising the amino acid sequence ISSGLLSGRSANI (SEQ ID NO: 1102), which is also referred to herein as substrate 2013; the heavy chain complementarity determining regions (CDRs) of the heavy chain (HC) sequence of SEQ ID NO: 546, and the light chain complementarity determining regions (CDRs) of the light chain (LC) sequence of SEQ ID NO: 543.

[0282] In some embodiments, the activatable antibody comprises a MM comprising the amino acid sequence ACRICQDHPATKWNS (SEQ ID NO: 549), a CM comprising the amino acid sequence ISSGLLSGRSDNI (SEQ ID NO: 1111), which is also referred to herein as substrate 2014; the heavy chain complementarity determining regions (CDRs) of the heavy chain (HC) sequence of SEQ ID NO: 546, and the light chain complementarity determining regions (CDRs) of the light chain (LC) sequence of SEQ ID NO: 543.

[0283] In some embodiments, the activatable antibody comprises a light chain comprising an amino acid sequence selected from the group consisting of SEQ ID NOs: 1808, 1810, 1812, 1814, 1816, 1818, 1820, 1822, 1824, 1826, 1828, and 1830; and a heavy chain comprising the amino acid sequence of SEQ ID NO: 546.

[0284] In some embodiments, the activatable antibody comprises a light chain comprising the amino acid sequence of SEQ ID NO: 1808; and a heavy chain comprising the amino acid sequence of SEQ ID NO: 546.

[0285] In some embodiments, the activatable antibody comprises a light chain comprising the amino acid sequence of SEQ ID NO: 1810; and a heavy chain comprising the amino acid sequence of SEQ ID NO: 546.

[0286] In some embodiments, the activatable antibody comprises a light chain comprising the amino acid sequence of SEQ ID NO: 1812; and a heavy chain comprising the amino acid sequence of SEQ ID NO: 546.

[0287] In some embodiments, the activatable antibody comprises a light chain comprising the amino acid sequence of SEQ ID NO: 1814; and a heavy chain comprising the amino acid sequence of SEQ ID NO: 546.

[0288] In some embodiments, the activatable antibody comprises a light chain comprising the amino acid sequence of SEQ ID NO: 1816; and a heavy chain comprising the amino acid sequence of SEQ ID NO: 546.

[0289] In some embodiments, the activatable antibody comprises a light chain comprising the amino acid sequence of SEQ ID NO: 1818; and a heavy chain comprising the amino acid sequence of SEQ ID NO: 546.

[0290] In some embodiments, the activatable antibody comprises a light chain comprising the amino acid sequence of SEQ ID NO: 1820; and a heavy chain comprising the amino acid sequence of SEQ ID NO: 546.

[0291] In some embodiments, the activatable antibody comprises a light chain comprising the amino acid sequence of SEQ ID NO: 1822; and a heavy chain comprising the amino acid sequence of SEQ ID NO: 546.

[0292] In some embodiments, the activatable antibody comprises a light chain comprising the amino acid sequence of SEQ ID NO: 1824; and a heavy chain comprising the amino acid sequence of SEQ ID NO: 546.

[0293] In some embodiments, the activatable antibody comprises a light chain comprising the amino acid sequence of SEQ ID NO: 1826; and a heavy chain comprising the amino acid sequence of SEQ ID NO: 546.

[0294] In some embodiments, the activatable antibody comprises a light chain comprising the amino acid sequence of SEQ ID NO: 1828; and a heavy chain comprising the amino acid sequence of SEQ ID NO: 546.

[0295] In some embodiments, the activatable antibody comprises a light chain comprising the amino acid sequence of SEQ ID NO: 1830; and a heavy chain comprising the amino acid sequence of SEQ ID NO: 546.

[0296] In some embodiments, the activatable antibody is encoded by a nucleic acid sequence that comprises a nucleic acid sequence encoding a heavy chain amino acid sequence selected from the group consisting of SEQ ID NO: 1, 5, 9, 13, 17, 21, 23, 25, 27, 29, 31, 33, 35, and 37. In some embodiments, the activatable antibody is encoded by a nucleic acid sequence that comprises a nucleic acid sequence encoding a heavy chain amino acid sequence selected from the group consisting of SEQ ID NO: 21, 23, 25, 27, 29, 31, 33, 35, and 37.

[0297] In some embodiments, the activatable antibody is encoded by a nucleic acid sequence that comprises a nucleic acid sequence encoding a light chain amino acid sequence selected from the group consisting of SEQ ID NO: 3, 7, 11, 15, 19, 39, 41, 43, 45, 47, 49, 51, 53, 55, 57, and 59. In some embodiments, the activatable antibody is encoded by a nucleic acid sequence that comprises a nucleic acid sequence encoding a light chain amino acid sequence selected from the group consisting of SEQ ID NO: 39, 41, 43, 45, 47, 49, 51, 53, 55, 57, and 59.

[0298] In some embodiments, the activatable antibody is encoded by a nucleic acid sequence that comprises a nucleic acid sequence encoding a heavy chain amino acid sequence selected from the group consisting of SEQ ID NO: 1, 5, 9, 13, 17, 21, 23, 25, 27, 29, 31, 33, 35, and 37, and a nucleic acid sequence that comprises a nucleic acid sequence encoding a light chain amino acid sequence selected from the group consisting of SEQ ID NO: 3, 7, 11, 15, 19, 39, 41, 43, 45, 47, 49, 51, 53, 55, 57, and 59.

[0299] In some embodiments, the activatable antibody is encoded by a nucleic acid sequence that comprises a nucleic acid sequence encoding a heavy chain amino acid sequence selected from the group consisting of SEQ ID NO: 21, 23, 25, 27, 29, 31, 33, 35, and 37, and a nucleic acid sequence that comprises a nucleic acid sequence encoding a light chain amino acid sequence selected from the group consisting of SEQ ID NO: 39, 41, 43, 45, 47, 49, 51, 53, 55, 57, and 59.

[0300] In some embodiments, the activatable antibody is encoded by a nucleic acid sequence that comprises a nucleic acid sequence encoding a heavy chain amino acid sequence that is at least 90%, 91%, 92%, 93%, 94%, 95%, 96%, 97%, 98% or 99% identical to an amino acid sequence selected from the group consisting of SEQ ID NO: 1, 5, 9, 13, 17, 21, 23, 25, 27, 29, 31, 33, 35, and 37. In some embodiments, the activatable antibody is encoded by a nucleic acid sequence that comprises a nucleic acid sequence encoding a heavy chain amino acid sequence that is at least 90%, 91%, 92%, 93%, 94%, 95%, 96%, 97%, 98% or 99% identical to an amino acid sequence selected from the group consisting of SEQ ID NO: 21, 23, 25, 27, 29, 31, 33, 35, and 37.

[0301] In some embodiments, the activatable antibody is encoded by a nucleic acid sequence that comprises a nucleic acid sequence encoding a light chain amino acid that is at least 90%, 91%, 92%, 93%, 94%, 95%, 96%, 97%, 98% or 99% identical to the amino acid sequence selected from the group consisting of SEQ ID NO: 3, 7, 11, 15, 19, 39, 41, 43, 45, 47, 49, 51, 53, 55, 57, and 59. In some embodiments, the activatable antibody is encoded by a nucleic acid sequence that comprises a nucleic acid sequence encoding a light chain amino acid that is at least 90%, 91%, 92%, 93%, 94%, 95%, 96%, 97%, 98% or 99% identical to the amino acid sequence selected from the group consisting of SEQ ID NO: 39, 41, 43, 45, 47, 49, 51, 53, 55, 57, and 59.

[0302] In some embodiments, the activatable antibody is encoded by a nucleic acid sequence that comprises a nucleic acid sequence encoding a heavy chain amino acid sequence that is at least 90%, 91%, 92%, 93%, 94%, 95%, 96%, 97%, 98% or 99% identical to an amino acid sequence selected from the group consisting of SEQ ID NO: 1, 5, 9, 13, 17, 21, 23, 25, 27, 29, 31, 33, 35, and 37, and a nucleic acid sequence encoding a light chain amino acid that is at least 90%, 91%, 92%, 93%, 94%, 95%, 96%, 97%, 98% or 99% identical to the amino acid sequence selected from the group consisting of SEQ ID NO: 3, 7, 11, 15, 19, 39, 41, 43, 45, 47, 49, 51, 53, 55, 57, and 59.

[0303] In some embodiments, the activatable antibody is encoded by a nucleic acid sequence that comprises a nucleic acid sequence encoding a heavy chain amino acid sequence that is at least 90%, 91%, 92%, 93%, 94%, 95%, 96%, 97%, 98% or 99% identical to an amino acid sequence selected from the group consisting of SEQ ID NO: 21, 23, 25, 27, 29, 31, 33, 35, and 37, and a nucleic acid sequence that comprises a nucleic acid sequence encoding a light chain amino acid that is at least 90%, 91%, 92%, 93%, 94%, 95%, 96%, 97%, 98% or 99% identical to the amino acid sequence selected from the group consisting of SEQ ID NO: 39, 41, 43, 45, 47, 49, 51, 53, 55, 57, and 59.

[0304] In some embodiments, the activatable antibody is encoded by a heavy chain nucleic acid sequence selected from the group consisting of SEQ ID NO: 2, 6, 10, 14, 18, 22, 24, 26, 28, 30, 32, 34, 36, and 38. In some embodiments, the activatable antibody is encoded by a heavy chain nucleic acid sequence selected from the group consisting of SEQ ID NO: 22, 24, 26, 28, 30, 32, 34, 36, and 38.

[0305] In some embodiments, the activatable antibody is encoded by a light chain nucleic acid sequence selected from the group consisting of SEQ ID NO: 4, 8, 12, 16, 20, 40, 42, 44, 46, 48, 50, 52, 54, 56, 58, and 60. In some embodiments, the activatable antibody is encoded by a light chain nucleic acid sequence selected from the group consisting of SEQ ID NO: 40, 42, 44, 46, 48, 50, 52, 54, 56, 58, and 60.

[0306] In some embodiments, the activatable antibody is encoded by heavy chain nucleic acid sequence selected from the group consisting of SEQ ID NO: selected from the group consisting of SEQ ID NO: 2, 6, 10, 14, 18, 22, 24, 26, 28, 30, 32, 34, 36, and 38, and a light chain nucleic acid sequence selected from the group consisting of SEQ ID NO: 4, 8, 12, 16, 20, 40, 42, 44, 46, 48, 50, 52, 54, 56, 58, and 60. In some embodiments, the activatable antibody is encoded by heavy chain nucleic acid sequence selected from the group consisting of SEQ ID NO: selected from the group consisting of SEQ ID NO: 22, 24, 26, 28, 30, 32, 34, 36, and 38, and a light chain nucleic acid sequence selected from the group consisting of SEQ ID NO: 40, 42, 44, 46, 48, 50, 52, 54, 56, 58, and 60.

[0307] In some embodiments, the activatable antibody is encoded by a nucleic acid sequence that is at least 90%, 91%, 92%, 93%, 94%, 95%, 96%, 97%, 98% or 99% identical to a heavy chain nucleic acid sequence selected from the group consisting of SEQ ID NO: 2, 6, 10, 14, 18, 22, 24, 26, 28, 30, 32, 34, 36, and 38. In some embodiments, the activatable antibody is encoded by a nucleic acid sequence that is at least 90%, 91%, 92%, 93%, 94%, 95%, 96%, 97%, 98% or 99% identical to a heavy chain nucleic acid sequence selected from the group consisting of SEQ ID NO: 22, 24, 26, 28, 30, 32, 34, 36, and 38.

[0308] In some embodiments, the activatable antibody is encoded by a nucleic acid sequence that is at least 90%, 91%, 92%, 93%, 94%, 95%, 96%, 97%, 98% or 99% identical to a light chain nucleic acid sequence selected from the group consisting of SEQ ID NO: 4, 8, 12, 16, 20, 40, 42, 44, 46, 48, 50, 52, 54, 56, 58, and 60. In some embodiments, the activatable antibody is encoded by a nucleic acid sequence that is at least 90%, 91%, 92%, 93%, 94%, 95%, 96%, 97%, 98% or 99% identical to a light chain nucleic acid sequence selected from the group consisting of SEQ ID NO: 40, 42, 44, 46, 48, 50, 52, 54, 56, 58, and 60.

[0309] In some embodiments, the activatable antibody is encoded by a nucleic acid sequence that is at least 90%, 91%, 92%, 93%, 94%, 95%, 96%, 97%, 98% or 99% identical to a heavy chain nucleic acid sequence selected from the group consisting of SEQ ID NO: 2, 6, 10, 14, 18, 22, 24, 26, 28, 30, 32, 34, 36, and 38, and a nucleic acid sequence that is at least 90%, 91%, 92%, 93%, 94%, 95%, 96%, 97%, 98% or 99% identical to a light chain nucleic acid sequence selected from the group consisting of SEQ ID NO: 4, 8, 12, 16, 20, 40, 42, 44, 46, 48, 50, 52, 54, 56, 58, and 60. In some embodiments, the activatable antibody is encoded by a nucleic acid sequence that is at least 90%, 91%, 92%, 93%, 94%, 95%, 96%, 97%, 98% or 99% identical to a heavy chain nucleic acid sequence selected from the group consisting of SEQ ID NO: 22, 24, 26, 28, 30, 32, 34, 36, and 38, and a nucleic acid sequence that is at least 90%, 91%, 92%, 93%, 94%, 95%, 96%, 97%, 98% or 99% identical to a light chain nucleic acid sequence selected from the group consisting of SEQ ID NO: 40, 42, 44, 46, 48, 50, 52, 54, 56, 58, and 60.

[0310] In some embodiments, the MM has a dissociation constant, i.e., dissociation constant at an equilibrium state, K_{d} for binding to the AB that is greater than the K_{d} for binding of the AB to PD-1.

[0311] In some embodiments, the MM has a K_{d} for binding to the AB that is no more than the K_{d} for binding of the AB to PD-1.

[0312] In some embodiments, the MM has a K_{d} for binding to the AB that is no less than the K_{d} for binding of the AB to PD-1.

[0313] In some embodiments, the MM has a K_{d} for binding to the AB that is approximately equal to the K_{d} for binding of the AB to PD-1.

[0314] In some embodiments, the MM has a K_{d} for binding to the AB that is less than the K_{d} for binding of the AB to PD-1.

[0315] In some embodiments, the MM has a K_{d} for binding to the AB that is no more than 2, 3, 4, 5, 10, 25, 50, 100, 250, 500, or 1,000 fold greater than the K_{d} for binding of the AB to PD-1. In some embodiments, the MM has a K_{d} for binding to the AB that is between 1-5, 2-5, 2-10, 5-10, 5-20, 5-50, 5-100, 10-100, 10-1,000, 20-100, 20-1000, or 100-1,000 fold greater than the K_{d} for binding of the AB to PD-1.

[0316] In some embodiments, the MM has an affinity for binding to the AB that is less than the affinity of binding of the AB to PD-1.

[0317] In some embodiments, the MM has an affinity for binding to the AB that is no more than the affinity of binding of the AB to PD-1.

[0318] In some embodiments, the MM has an affinity for binding to the AB that is approximately equal of the affinity of binding of the AB to PD-1.

[0319] In some embodiments, the MM has an affinity for binding to the AB that is no less than the affinity of binding of the AB to PD-1.

[0320] In some embodiments, the MM has an affinity for binding to the AB that is greater than the affinity of binding of the AB to PD-1.

[0321] In some embodiments, the MM has an affinity for binding to the AB that is 2, 3, 4, 5, 10, 25, 50, 100, 250, 500, or 1,000 less than the affinity of binding of the AB to PD-1. I In some embodiments, the MM has an affinity for binding to the AB that is between 1-5, 2-5, 2-10, 5-10, 5-20, 5-50, 5-100, 10-100, 10-1,000, 20-100, 20-1000, or 100-1,000 fold less than the affinity of binding of the AB to PD-1. In some embodiments, the MM has an affinity for binding to the AB that is 2 to 20 fold less than the affinity of binding of the AB to PD-1. In some embodiments, a MM not covalently linked to the AB and at equimolar concentration to the AB does not inhibit the binding of the AB to PD-1.

[0322] In some embodiments, the MM does not interfere or compete with the AB for binding to PD-1 when the activatable antibody is in a cleaved state.

[0323] In some embodiments, the MM is a polypeptide of about 2 to 40 amino acids in length. In some embodiments, the MM is a polypeptide of up to about 40 amino acids in length.

[0324] In some embodiments, the MM is a polypeptide of no more than 40 amino acids in length.

[0325] In some embodiments, the MM polypeptide sequence is different from that of PD-1. In some embodiments, the MM polypeptide sequence is different from that of human PD-1. In some embodiments, the MM polypeptide sequence is no more than 50% identical to any natural binding partner of the AB. In some embodiments, the MM polypeptide sequence is different from that of PD-1 and is no more than 40%, 30%, 25%, 20%, 15%, or 10% identical to any natural binding partner of the AB. In some embodiments, the MM polypeptide sequence is no more than 50% identical to human PD-1. In some embodiments, the MM polypeptide sequence is different from that of PD-1 and is no more than 40%, 30%, 25%, 20%, 15%, or 10% identical to human PD-1.

[0326] In some embodiments, the MM comprises an amino acid sequence selected from the group consisting of SEQ ID NOs: 66-213, 384-514, 548-571, 1206-1295, and 1351-1465. In some embodiments, the MM comprises an amino acid sequence that is at least 90%, 91%, 92%, 93%, 94%, 95%, 96%, 97%, 98% or 99% identical to an amino acid sequence selected from the group consisting of SEQ ID NOs: 66-213, 384-514, 548-571, 1206-1295, and 1351-1465. In some embodiments, the MM comprises an amino acid sequence selected from the group consisting of SEQ ID NOs: 66, 67, 70, 71, 74, 77, 81, 82, 84, 90, 91, 93, and 99. In some embodiments, the MM comprises an amino acid sequence selected from the group consisting of SEQ ID NOs: 66, 71, 74, 77, 82, 84, 90, 91, 93, and 99. In some embodiments, the MM comprises an amino acid sequence selected from the group consisting of SEQ ID NOs: 1206-1217. In some embodiments, the MM comprises an amino acid sequence selected from the group consisting of SEQ ID NOs: 1351-1362.

[0327] In some embodiments, the MM comprises an amino acid sequence selected from the group consisting of SEQ ID NOs: 66-213. In some embodiments, the MM comprises an amino acid sequence that is at least 90%, 91%, 92%, 93%, 94%, 95%, 96%, 97%, 98% or 99% identical to an amino acid sequence selected from the group consisting of SEQ ID NOs: 66-213.

[0328] In some embodiments, the MM comprises an amino acid sequence selected from the group consisting of SEQ ID NOs: 384-514. In some embodiments, the MM comprises an amino acid sequence that is at least 90%, 91%, 92%, 93%, 94%, 95%, 96%, 97%, 98% or 99% identical to an amino acid sequence selected from the group consisting of SEQ ID NOs: 384-514.

[0329] In some embodiments, the MM comprises an amino acid sequence selected from the group consisting of SEQ ID NOs: 548-571. In some embodiments, the MM comprises an amino acid sequence that is at least 90%, 91%, 92%, 93%, 94%, 95%, 96%, 97%, 98% or 99% identical to an amino acid sequence selected from the group consisting of SEQ ID NOs: 548-571.

[0330] In some embodiments, the MM comprises an amino acid sequence selected from the group consisting of SEQ ID NOs: 1206-1295. In some embodiments, the MM comprises an amino acid sequence that is at least 90%, 91%, 92%, 93%, 94%, 95%, 96%, 97%, 98% or 99% identical to an amino acid sequence selected from the group consisting of SEQ ID NOs: 1206-1295.

[0331] In some embodiments, the MM comprises an amino acid sequence selected from the group consisting of SEQ ID NOs: 1351-1465. In some embodiments, the MM comprises an amino acid sequence that is at least 90%, 91%, 92%, 93%, 94%, 95%, 96%, 97%, 98% or 99% identical to an amino acid sequence selected from the group consisting of SEQ ID NOs: 1351-1465.

[0332] In some embodiments, the coupling of the MM to the AB reduces the ability of the AB to bind PD-1 such that the dissociation constant (K_{d}) of the AB when coupled to the MM towards PD-1 is at least two times greater than the K_{d} of the AB when not coupled to the MINI towards PD-1.

[0333] In some embodiments, the coupling of the MM to the AB reduces the ability of the AB to bind PD-1 such that the dissociation constant (K_{d}) of the AB when coupled to the MM towards PD-1 is at least five times greater than the K_{d} of the AB when not coupled to the MM towards PD-1.

[0334] In some embodiments, the coupling of the MM to the AB reduces the ability of the AB to bind PD-1 such that the dissociation constant (K_{d}) of the AB when coupled to the MM towards PD-1 is at least 10 times greater than the K_{d} of the AB when not coupled to the MINI towards PD-1.

[0335] In some embodiments, the coupling of the MM to the AB reduces the ability of the AB to bind PD-1 such that the dissociation constant (K_{d}) of the AB when coupled to the MM towards PD-1 is at least 20 times greater than the K_{d} of the AB when not coupled to the MINI towards PD-1.

[0336] In some embodiments, the coupling of the MM to the AB reduces the ability of the AB to bind PD-1 such that the dissociation constant (K_{d}) of the AB when coupled to the MM towards PD-1 is at least 40 times greater than the K_{d} of the AB when not coupled to the MINI towards PD-1.

[0337] In some embodiments, the coupling of the MM to the AB reduces the ability of the AB to bind PD-1 such that the dissociation constant (K_{d}) of the AB when coupled to the MM towards PD-1 is at least 100 times greater than the K_{d} of the AB when not coupled to the MINI towards PD-1.

[0338] In some embodiments, the coupling of the MM to the AB reduces the ability of the AB to bind PD-1 such that the dissociation constant (K_{d}) of the AB when coupled to the MM towards PD-1 is at least 1000 times greater than the K_{d} of the AB when not coupled to the MINI towards PD-1.

[0339] In some embodiments, the coupling of the MM to the AB reduces the ability of the AB to bind PD-1 such that the dissociation constant (K_{d}) of the AB when coupled to the MM towards PD-1 is at least 10,000 times greater than the K_{d} of the AB when not coupled to the MINI towards PD-1.

[0340] In some embodiments, in the presence of PD-1, the MM reduces the ability of the AB to bind PD-1 by at least 90% when the CM is uncleaved, as compared to when the CM is cleaved when assayed in vitro using a target displacement assay such as, for example, the assay described in PCT Publication No. WO 2010/081173, the contents of which are hereby incorporated by reference in their entirety.

[0341] In some embodiments, the protease that cleaves the CM is active, e.g., up-regulated, in diseased tissue, and the protease cleaves the CM in the activatable antibody when the activatable antibody is exposed to the protease.

[0342] In some embodiments, the protease is produced by a tumor that is in proximity to T cells that express PD-1, and the protease cleaves the CM in the activatable antibody when the activatable antibody is exposed to the protease. In some embodiments, the protease is produced by a tumor that is co-localized with T cells that express PD-1, and the protease cleaves the CM in the activatable antibody when the activatable antibody is exposed to the protease.

[0343] In some embodiments, the CM is positioned in the activatable antibody such that when the activatable antibody is in the uncleaved state, binding of the activatable antibody to PD-1 is reduced to occur with a dissociation constant that is at least twofold greater than the dissociation constant of an unmodified AB binding to PD-1, whereas in the cleaved state (i.e., when the activatable antibody is in the cleaved state), the AB binds PD-1.

[0344] In some embodiments, the CM is positioned in the activatable antibody such that when the activatable antibody is in the uncleaved state, binding of the activatable antibody to PD-1 is reduced to occur with a dissociation constant that is at least fivefold greater than the dissociation constant of an unmodified AB binding to PD-1, whereas in the cleaved state (i.e., when the activatable antibody is in the cleaved state), the AB binds PD-1.

[0345] In some embodiments, the CM is positioned in the activatable antibody such that when the activatable antibody is in the uncleaved state, binding of the activatable antibody to PD-1 is reduced to occur with a dissociation constant that is at least 10-fold greater than the dissociation constant of an unmodified AB binding to PD-1, whereas in the cleaved state (i.e., when the activatable antibody is in the cleaved state), the AB binds PD-1.

[0346] In some embodiments, the CM is positioned in the activatable antibody such that when the activatable antibody is in the uncleaved state, binding of the activatable antibody to PD-1 is reduced to occur with a dissociation constant that is at least 20-fold greater than the dissociation constant of an unmodified AB binding to PD-1, whereas in the cleaved state (i.e., when the activatable antibody is in the cleaved state), the AB binds PD-1.

[0347] In some embodiments, the CM is positioned in the activatable antibody such that when the activatable antibody is in the uncleaved state, binding of the activatable antibody to PD-1 is reduced to occur with a dissociation constant that is at least 40-fold greater than the dissociation constant of an unmodified AB binding to PD-1, whereas in the cleaved state, the AB binds PD-1.

[0348] In some embodiments, the CM is positioned in the activatable antibody such that when the activatable antibody is in the uncleaved state, binding of the activatable antibody to PD-1 is reduced to occur with a dissociation constant that is at least 50-fold greater than the dissociation constant of an unmodified AB binding to PD-1, whereas in the cleaved state, the AB binds PD-1.

[0349] In some embodiments, the CM is positioned in the activatable antibody such that when the activatable antibody is in the uncleaved state, binding of the activatable antibody to PD-1 is reduced to occur with a dissociation constant that is at least 100-fold greater than the dissociation constant of an unmodified AB binding to PD-1, whereas in the cleaved state, the AB binds PD-1.

[0350] In some embodiments, the CM is positioned in the activatable antibody such that when the activatable antibody is in the uncleaved state, binding of the activatable antibody to PD-1 is reduced to occur with a dissociation constant that is at least 200-fold greater than the dissociation constant of an unmodified AB binding to PD-1, whereas in the cleaved state, the AB binds PD-1.

[0351] In some embodiments, the CM is a polypeptide of up to 15 amino acids in length.

[0352] In some embodiments, the CM is a polypeptide that includes a first cleavable moiety (CM1) that is a substrate for at least one matrix metalloprotease (MMP) and a second cleavable moiety (CM2) that is a substrate for at least one serine protease (SP). In some embodiments, each of the CM1 substrate sequence and the CM2 substrate sequence of the CM1-CM2 substrate is independently a polypeptide of up to 15 amino acids in length.

[0353] In some embodiments, the CM is a substrate for at least one protease that is or is believed to be up-regulated in cancer. In some embodiments, the CM is a substrate for at least one protease that is or is believed to be up-regulated in inflammation. In some embodiments, the CM is a substrate for at least one protease that is or is believed to be up-regulated in autoimmunity.

[0354] In some embodiments, the CM is a substrate for at least one protease selected from the group consisting of a matrix metalloprotease (MMP), thrombin, a neutrophil elastase, a cysteine protease, legumain, and a serine protease, such as matriptase (MT-SP1), and urokinase (uPA). Without being bound by theory, it is believed that these proteases are up-regulated in at least one of cancer, inflammation, and/or autoimmunity.

[0355] Exemplary substrates include but are not limited to substrates cleavable by one or more of the following enzymes or proteases listed in Table 3.

[0356] In some embodiments, the CM is selected for use with a specific protease, for example a protease that is known to be co-localized with the target of the activatable antibody. For example, the protease is produced by a tumor that is in proximity to T cells that express PD-1. In some embodiments, the protease is produced by a tumor that is co-localized with T cells that express PD-1.

[0357] In some embodiments, the CM is a substrate for at least one MMP. Examples of MMPs include the MMPs listed in the Table 3. In some embodiments, the CM is a substrate for a protease selected from the group consisting of MMP9, MMP14, MMP1, MMP3, MMP13, MMP17, MMP11, and MMP19. In some embodiments the CM is a substrate for MMP9. In some embodiments, the CM is a substrate for MMP14.

[0358] In some embodiments, the CM is a substrate that includes the sequence TGRGPSWV (SEQ ID NO: 295); SARGPSRW (SEQ ID NO: 319); TARGPSFK (SEQ ID NO: 297); LSGRSDNH (SEQ ID NO: 294); GGWHTGRN (SEQ ID NO: 320); HTGRSGAL (SEQ ID NO: 321); PLTGRSGG (SEQ ID NO: 296); AARGPAIH (SEQ ID NO: 322); RGPAFNPM (SEQ ID NO: 323); SSRGPAYL (SEQ ID NO: 324); RGPATPIM (SEQ ID NO: 325); RGPA (SEQ ID NO: 326); GGQPSGMWGW (SEQ ID NO: 327); FPRPLGITGL (SEQ ID NO: 328); VHMPLGFLGP (SEQ ID NO: 302); SPLTGRSG (SEQ ID NO: 329); SAGFSLPA (SEQ ID NO: 330); LAPLGLQRR (SEQ ID NO: 331); SGGPLGVR (SEQ ID NO: 332); PLGL (SEQ ID NO: 333); LSGRSGNH (SEQ ID NO: 1157); SGRSANPRG (SEQ ID NO: 1158); LSGRSDDH (SEQ ID NO: 1161); LSGRSDIH (SEQ ID NO: 1162); LSGRSDQH (SEQ ID NO: 1165); LSGRSDTH (SEQ ID NO: 1166); LSGRSDYH (SEQ ID NO: 1169); LSGRSDNP (SEQ ID NO: 1520); LSGRSANP (SEQ ID NO: 1695); LSGRSANI (SEQ ID NO: 1696); and/or LSGRSDNI (SEQ ID NO: 1697).

[0359] In some embodiments, the CM comprises the amino acid sequence LSGRSDNH (SEQ ID NO: 294). In some embodiments, the CM comprises the amino acid sequence TGRGPSWV (SEQ ID NO: 295). In some embodiments, the CM comprises the amino acid sequence PLTGRSGG (SEQ ID NO: 296). In some embodiments, the CM comprises the amino acid sequence GGQPSGMWGW (SEQ ID NO: 327). In some embodiments, the CM comprises the amino acid sequence FPRPLGITGL (SEQ ID NO: 328). In some embodiments, the CM comprises the amino acid sequence VHMPLGFLGP (SEQ ID NO: 302). In some embodiments, the CM comprises the amino acid sequence PLGL (SEQ ID NO: 333). In some embodiments, the CM comprises the amino acid sequence SARGPSRW (SEQ ID NO: 319). In some embodiments, the CM comprises the amino acid sequence TARGPSFK (SEQ ID NO: 297). In some embodiments, the CM comprises the amino acid sequence GGWHTGRN (SEQ ID NO: 320). In some embodiments, the CM comprises the amino acid sequence HTGRSGAL (SEQ ID NO: 321). In some embodiments, the CM comprises the amino acid sequence AARGPAIH (SEQ ID NO: 322). In some embodiments, the CM comprises the amino acid sequence RGPAFNPM (SEQ ID NO: 323). In some embodiments, the CM comprises the amino acid sequence SSRGPAYL (SEQ ID NO: 324). In some embodiments, the CM comprises the amino acid sequence RGPATPIM (SEQ ID NO: 325). In some embodiments, the CM comprises the amino acid sequence RGPA (SEQ ID NO: 326). In some embodiments, the CM comprises the amino acid sequence LSGRSGNH (SEQ ID NO: 1157). In some embodiments, the CM comprises the amino acid sequence SGRSANPRG (SEQ ID NO: 1158). In some embodiments, the CM comprises the amino acid sequence LSGRSDDH (SEQ ID NO: 1161). In some embodiments, the CM comprises the amino acid sequence LSGRSDIH (SEQ ID NO: 1162). In some embodiments, the CM comprises the amino acid sequence LSGRSDQH (SEQ ID NO: 1165). In some embodiments, the CM comprises the amino acid sequence LSGRSDTH (SEQ ID NO: 1166). In some embodiments, the CM comprises the amino acid sequence LSGRSDYH (SEQ ID NO: 1169). In some embodiments, the CM comprises the amino acid sequence LSGRSDNP (SEQ ID NO: 1520). In some embodiments, the CM comprises the amino acid sequence LSGRSANP (SEQ ID NO: 1695). In some embodiments, the CM comprises the amino acid sequence LSGRSANI (SEQ ID NO: 1696). In some embodiments, the CM comprises the amino acid sequence LSGRSDNI (SEQ ID NO: 1697).

[0360] In some embodiments, the CM is a substrate for an MMP and includes the sequence ISSGLSS (SEQ ID NO: 334); QNQALRMA (SEQ ID NO: 305); AQNLLGMV (SEQ ID NO: 304); STFPFGMF (SEQ ID NO: 307); PVGYTSSL (SEQ ID NO: 335); DWLYWPGI (SEQ ID NO: 336), ISSGLLSS (SEQ ID NO: 308), LKAAPRWA (SEQ ID NO: 337); GPSHLVLT (SEQ ID NO: 338); LPGGLSPW (SEQ ID NO: 339); MGLFSEAG (SEQ ID NO: 340); SPLPLRVP (SEQ ID NO: 341); RMHLRSLG (SEQ ID NO: 342); LAAPLGLL (SEQ ID NO: 306); AVGLLAPP (SEQ ID NO: 303); LLAPSHRA (SEQ ID NO: 343); PAGLWLDP (SEQ ID NO: 309); MIAPVAYR (SEQ ID NO: 1698); RPSPMWAY (SEQ ID NO: 1699); WATPRPMR (SEQ ID NO: 1700); FRLLDWQW (SEQ ID NO: 1701); ISSGL (SEQ ID NO: 1702); ISSGLLS (SEQ ID NO: 1703); and/or ISSGLL (SEQ ID NO: 1704).

[0361] In some embodiments, the CM comprises the amino acid sequence ISSGLSS (SEQ ID NO: 334). In some embodiments, the CM comprises the amino acid sequence QNQALRMA (SEQ ID NO: 305). In some embodiments, the CM comprises the amino acid sequence AQNLLGMV (SEQ ID NO: 304). In some embodiments, the CM comprises the amino acid sequence STFPFGMF (SEQ ID NO: 307). In some embodiments, the CM comprises the amino acid sequence PVGYTSSL (SEQ ID NO: 335). In some embodiments, the CM comprises the amino acid sequence DWLYWPGI (SEQ ID NO: 336). In some embodiments, the CM comprises the amino acid sequence ISSGLLSS (SEQ ID NO: 308). In some embodiments, the CM comprises the amino acid sequence LKAAPRWA (SEQ ID NO: 337). In some embodiments, the CM comprises the amino acid sequence GPSHLVLT (SEQ ID NO: 338). In some embodiments, the CM comprises the amino acid sequence LPGGLSPW (SEQ ID NO: 339). In some embodiments, the CM comprises the amino acid sequence MGLFSEAG (SEQ ID NO: 340). In some embodiments, the CM comprises the amino acid sequence SPLPLRVP (SEQ ID NO: 341). In some embodiments, the CM comprises the amino acid sequence RMHLRSLG (SEQ ID NO: 342). In some embodiments, the CM comprises the amino acid sequence LAAPLGLL (SEQ ID NO: 306). In some embodiments, the CM comprises the amino acid sequence AVGLLAPP (SEQ ID NO: 303). In some embodiments, the CM comprises the amino acid sequence LLAPSHRA (SEQ ID NO: 343). In some embodiments, the CM comprises the amino acid sequence PAGLWLDP (SEQ ID NO: 309). In some embodiments, the CM comprises the amino acid sequence MIAPVAYR (SEQ ID NO: 1698). In some embodiments, the CM comprises the amino acid sequence RPSPMWAY (SEQ ID NO: 1699). In some embodiments, the CM comprises the amino acid sequence WATPRPMR (SEQ ID NO: 1700). In some embodiments, the CM comprises the amino acid sequence FRLLDWQW (SEQ ID NO: 1701). In some embodiments, the CM comprises the amino acid sequence ISSGL (SEQ ID NO: 1702). In some embodiments, the CM comprises the amino acid sequence ISSGLLS (SEQ ID NO: 1703). In some embodiments, the CM comprises the amino acid sequence ISSGLL (SEQ ID NO: 1704).

[0362] In some embodiments, the CM is a substrate for thrombin. In some embodiments, the CM is a substrate for thrombin and includes the sequence GPRSFGL (SEQ ID NO: 344) or GPRSFG (SEQ ID NO: 345). In some embodiments, the CM comprises the amino acid sequence GPRSFGL (SEQ ID NO: 344). In some embodiments, the CM comprises the amino acid sequence GPRSFG (SEQ ID NO: 345).

[0363] In some embodiments, the CM comprises an amino acid sequence selected from the group consisting of NTLSGRSENHSG (SEQ ID NO: 298); NTLSGRSGNHGS (SEQ ID NO: 299); TSTSGRSANPRG (SEQ ID NO: 300); TSGRSANP (SEQ ID NO: 301); VAGRSMRP (SEQ ID NO: 310); VVPEGRRS (SEQ ID NO: 311); ILPRSPAF (SEQ ID NO: 312); MVLGRSLL (SEQ ID NO: 313); QGRAITFI (SEQ ID NO: 314); SPRSIMLA (SEQ ID NO: 315); and SMLRSMPL (SEQ ID NO: 316).

[0364] In some embodiments, the CM comprises the amino acid sequence NTLSGRSENHSG (SEQ ID NO: 298). In some embodiments, the CM comprises the amino acid sequence NTLSGRSGNHGS (SEQ ID NO: 299). In some embodiments, the CM comprises the amino acid sequence TSTSGRSANPRG (SEQ ID NO: 300). In some embodiments, the CM comprises the amino acid sequence TSGRSANP (SEQ ID NO: 301). In some embodiments, the CM comprises the amino acid sequence VAGRSMRP (SEQ ID NO: 310). In some embodiments, the CM comprises the amino acid sequence VVPEGRRS (SEQ ID NO: 311). In some embodiments, the CM comprises the amino acid sequence ILPRSPAF (SEQ ID NO: 312). In some embodiments, the CM comprises the amino acid sequence MVLGRSLL (SEQ ID NO: 313). In some embodiments, the CM comprises the amino acid sequence QGRAITFI (SEQ ID NO: 314). In some embodiments, the CM comprises the amino acid sequence SPRSIMLA (SEQ ID NO: 315). In some embodiments, the CM comprises the amino acid sequence SMLRSMPL (SEQ ID NO: 316).

[0365] In some embodiments, the CM comprises an amino acid sequence selected from the group consisting of SEQ ID NOs: 214, 294-361, 1092-1112, 1157, 1158, 1161, 1162, 1165, 1166, 1169, 1520, and 1695-1704. In some embodiments, the CM comprises an amino acid sequence selected from the group consisting of SEQ ID NOs: 214, 294, 300, 302, 303, 305, 308, 318, 347, 361, 1092-1102, 1111, and 1157.

[0366] In some embodiments, the CM is a substrate for a neutrophil elastase. In some embodiments, the CM is a substrate for a serine protease. In some embodiments, the CM is a substrate for uPA. In some embodiments, the CM is a substrate for legumain. In some embodiments, the CM is a substrate for matriptase. In some embodiments, the CM is a substrate for a cysteine protease. In some embodiments, the CM is a substrate for a cysteine protease, such as a cathepsin.

[0367] In some embodiments, the CM is a CM1-CM2 substrate and includes the sequence ISSGLLSGRSDNH (SEQ ID NO: 214); ISSGLLSSGGSGGSLSGRSDNH (SEQ ID NO: 346); AVGLLAPPGGTSTSGRSANPRG (SEQ ID NO: 347); TSTSGRSANPRGGGAVGLLAPP (SEQ ID NO: 348); VHMPLGFLGPGGTSTSGRSANPRG (SEQ ID NO: 349); TSTSGRSANPRGGGVHMPLGFLGP (SEQ ID NO: 350); AVGLLAPPGGLSGRSDNH (SEQ ID NO: 318); LSGRSDNHGGAVGLLAPP (SEQ ID NO: 351); VHMPLGFLGPGGLSGRSDNH (SEQ ID NO: 352); LSGRSDNHGGVHMPLGFLGP (SEQ ID NO: 353); LSGRSDNHGGSGGSISSGLLSS (SEQ ID NO: 354); LSGRSGNHGGSGGSISSGLLSS (SEQ ID NO: 355); ISSGLLSSGGSGGSLSGRSGNH (SEQ ID NO: 356); LSGRSDNHGGSGGSQNQALRMA (SEQ ID NO: 357); QNQALRMAGGSGGSLSGRSDNH (SEQ ID NO: 358); LSGRSGNHGGSGGSQNQALRMA (SEQ ID NO: 359); QNQALRMAGGSGGSLSGRSGNH (SEQ ID NO: 360); ISSGLLSGRSGNH (SEQ ID NO: 361); ISSGLLSGRSANPRG (SEQ ID NO: 1092); AVGLLAPPTSGRSANPRG (SEQ ID NO: 1093); AVGLLAPPSGRSANPRG (SEQ ID NO: 1094); ISSGLLSGRSDDH (SEQ ID NO: 1095); ISSGLLSGRSDIH (SEQ ID NO: 1096); ISSGLLSGRSDQH (SEQ ID NO: 1097); ISSGLLSGRSDTH (SEQ ID NO: 1098); ISSGLLSGRSDYH (SEQ ID NO: 1099); ISSGLLSGRSDNP (SEQ ID NO: 1100); ISSGLLSGRSANP (SEQ ID NO: 1101); ISSGLLSGRSANI (SEQ ID NO: 1102); AVGLLAPPGGLSGRSDDH (SEQ ID NO: 1103); AVGLLAPPGGLSGRSDIH (SEQ ID NO: 1104); AVGLLAPPGGLSGRSDQH (SEQ ID NO: 1105); AVGLLAPPGGLSGRSDTH (SEQ ID NO: 1106); AVGLLAPPGGLSGRSDYH (SEQ ID NO: 1107); AVGLLAPPGGLSGRSDNP (SEQ ID NO: 1108); AVGLLAPPGGLSGRSANP (SEQ ID NO: 1109); AVGLLAPPGGLSGRSANI (SEQ ID NO: 1110); ISSGLLSGRSDNI (SEQ ID NO: 1111); and/or AVGLLAPPGGLSGRSDNI (SEQ ID NO: 1112).

[0368] In some embodiments, the CM1-CM2 substrate includes the sequence ISSGLLSGRSDNH (SEQ ID NO: 214), which is also referred to herein as substrate 2001. In some embodiments, the CM1-CM2 substrate includes the sequence ISSGLLSSGGSGGSLSGRSDNH (SEQ ID NO: 346), which is also referred to herein as substrate 1001/LP′/0001, where LP′ as used in this CM1-CM2 substrate is the amino acid sequence GGSGGS (SEQ ID NO: 1519). In some embodiments, the CM1-CM2 substrate includes the sequence AVGLLAPPGGTSTSGRSANPRG (SEQ ID NO: 347), which is also referred to herein as substrate 1004/LP′/0003, where LP′ as used in this CM1-CM2 substrate is the amino acid sequence GG. In some embodiments, the CM1-CM2 substrate includes the sequence TSTSGRSANPRGGGAVGLLAPP (SEQ ID NO: 348), which is also referred to herein as substrate 0003/LP′/1004, where LP′ as used in this CM1-CM2 substrate is the amino acid sequence GG. In some embodiments, the CM1-CM2 substrate includes the sequence VHMPLGFLGPGGTSTSGRSANPRG (SEQ ID NO: 349), which is also referred to herein as substrate 1003/LP′/0003, where LP′ as used in this CM1-CM2 substrate is the amino acid sequence GG. In some embodiments, the CM1-CM2 substrate includes the sequence TSTSGRSANPRGGGVHMPLGFLGP (SEQ ID NO: 350), which is also referred to herein as substrate 0003/LP′/1003, where LP′ as used in this CM1-CM2 substrate is the amino acid sequence GG. In some embodiments, the CM1-CM2 substrate includes the sequence AVGLLAPPGGLSGRSDNH (SEQ ID NO: 318), which is also referred to herein as substrate 1004/LP′/0001, where LP′ as used in this CM1-CM2 substrate is the amino acid sequence GG. In some embodiments, the CM1-CM2 substrate includes the sequence LSGRSDNHGGAVGLLAPP (SEQ ID NO: 351), which is also referred to herein as substrate 0001/LP′/1004, where LP′ as used in this CM1-CM2 substrate is the amino acid sequence GG. In some embodiments, the CM1-CM2 substrate includes the sequence VHMPLGFLGPGGLSGRSDNH (SEQ ID NO: 352), which is also referred to herein as substrate 1003/LP′/0001, where LP′ as used in this CM1-CM2 substrate is the amino acid sequence GG. In some embodiments, the CM1-CM2 substrate includes the sequence LSGRSDNHGGVHMPLGFLGP (SEQ ID NO: 353), which is also referred to herein as substrate 0001/LP′/1003, where LP′ as used in this CM1-CM2 substrate is the amino acid sequence GG. In some embodiments, the CM1-CM2 substrate includes the sequence LSGRSDNHGGSGGSISSGLLSS (SEQ ID NO: 354), which is also referred to herein as substrate 0001/LP′/1001, where LP′ as used in this CM1-CM2 substrate is the amino acid sequence GGSGGS (SEQ ID NO: 1519). In some embodiments, the CM1-CM2 substrate includes the sequence LSGRSGNHGGSGGSISSGLLSS (SEQ ID NO: 355), which is also referred to herein as substrate 0002/LP′/1001, where LP′ as used in this CM1-CM2 substrate is the amino acid sequence GGSGGS (SEQ ID NO: 1519). In some embodiments, the CM1-CM2 substrate includes the sequence ISSGLLSSGGSGGSLSGRSGNH (SEQ ID NO: 356), which is also referred to herein as substrate 1001/LP′/0002, where LP′ as used in this CM1-CM2 substrate is the amino acid sequence GGSGGS (SEQ ID NO: 1519). In some embodiments, the CM1-CM2 substrate includes the sequence LSGRSDNHGGSGGSQNQALRMA (SEQ ID NO: 357), which is also referred to herein as substrate 0001/LP′/1002, where LP′ as used in this CM1-CM2 substrate is the amino acid sequence GGSGGS (SEQ ID NO: 1519). In some embodiments, the CM1-CM2 substrate includes the sequence QNQALRMAGGSGGSLSGRSDNH (SEQ ID NO: 358), which is also referred to herein as substrate 1002/LP′/0001, where LP′ as used in this CM1-CM2 substrate is the amino acid sequence GGSGGS (SEQ ID NO: 1519). In some embodiments, the CM1-CM2 substrate includes the sequence LSGRSGNHGGSGGSQNQALRMA (SEQ ID NO: 359), which is also referred to herein as substrate 0002/LP′/1002, where LP′ as used in this CM1-CM2 substrate is the amino acid sequence GGSGGS (SEQ ID NO: 1519). In some embodiments, the CM1-CM2 substrate includes the sequence QNQALRMAGGSGGSLSGRSGNH (SEQ ID NO: 360), which is also referred to herein as substrate 1002/LP′/0002, where LP′ as used in this CM1-CM2 substrate is the amino acid sequence GGSGGS (SEQ ID NO: 1519). In some embodiments, the CM1-CM2 substrate includes the sequence ISSGLLSGRSGNH (SEQ ID NO: 361), which is also referred to herein as substrate 2002. In some embodiments, the CM1-CM2 substrate includes the sequence ISSGLLSGRSANPRG (SEQ ID NO: 1092), which is also referred to herein as substrate 2003. In some embodiments, the CM1-CM2 substrate includes the sequence AVGLLAPPTSGRSANPRG (SEQ ID NO: 1093), which is also referred to herein as substrate 2004. In some embodiments, the CM1-CM2 substrate includes the sequence AVGLLAPPSGRSANPRG (SEQ ID NO: 1094), which is also referred to herein as substrate 2005. In some embodiments, the CM1-CM2 substrate includes the sequence ISSGLLSGRSDDH (SEQ ID NO: 1095), which is also referred to herein as substrate 2006. In some embodiments, the CM1-CM2 substrate includes the sequence ISSGLLSGRSDIH (SEQ ID NO: 1096), which is also referred to herein as substrate 2007. In some embodiments, the CM1-CM2 substrate includes the sequence ISSGLLSGRSDQH (SEQ ID NO: 1097), which is also referred to herein as substrate 2008. In some embodiments, the CM1-CM2 substrate includes the sequence ISSGLLSGRSDTH (SEQ ID NO: 1098), which is also referred to herein as substrate 2009. In some embodiments, the CM1-CM2 substrate includes the sequence ISSGLLSGRSDYH (SEQ ID NO: 1099), which is also referred to herein as substrate 2010. In some embodiments, the CM1-CM2 substrate includes the sequence ISSGLLSGRSDNP (SEQ ID NO: 1100), which is also referred to herein as substrate 2011. In some embodiments, the CM1-CM2 substrate includes the sequence ISSGLLSGRSANP (SEQ ID NO: 1101), which is also referred to herein as substrate 2012. In some embodiments, the CM1-CM2 substrate includes the sequence ISSGLLSGRSANI (SEQ ID NO: 1102), which is also referred to herein as substrate 2013. In some embodiments, the CM1-CM2 substrate includes the sequence AVGLLAPPGGLSGRSDDH (SEQ ID NO: 1103), which is also referred to herein as substrate 3006. In some embodiments, the CM1-CM2 substrate includes the sequence AVGLLAPPGGLSGRSDIH (SEQ ID NO: 1104), which is also referred to herein as substrate 3007. In some embodiments, the CM1-CM2 substrate includes the sequence AVGLLAPPGGLSGRSDQH (SEQ ID NO: 1105), which is also referred to herein as substrate 3008. In some embodiments, the CM1-CM2 substrate includes the sequence AVGLLAPPGGLSGRSDTH (SEQ ID NO: 1106), which is also referred to herein as substrate 3009. In some embodiments, the CM1-CM2 substrate includes the sequence AVGLLAPPGGLSGRSDYH (SEQ ID NO: 1107), which is also referred to herein as substrate 3010. In some embodiments, the CM1-CM2 substrate includes the sequence AVGLLAPPGGLSGRSDNP (SEQ ID NO: 1108), which is also referred to herein as substrate 3011. In some embodiments, the CM1-CM2 substrate includes the sequence AVGLLAPPGGLSGRSANP (SEQ ID NO: 1109), which is also referred to herein as substrate 3012. In some embodiments, the CM1-CM2 substrate includes the sequence AVGLLAPPGGLSGRSANI (SEQ ID NO: 1110), which is also referred to herein as substrate 3013. In some embodiments, the CM1-CM2 substrate includes the sequence ISSGLLSGRSDNI (SEQ ID NO: 1111), which is also referred to herein as substrate 2014. In some embodiments, the CM1-CM2 substrate includes the sequence and/or AVGLLAPPGGLSGRSDNI (SEQ ID NO: 1112), which is also referred to herein as substrate 3014. In some embodiments, the CM1-CM2 substrate includes the sequence GLSGRSDNHGGAVGLLAPP (SEQ ID NO: 1970), which is also referred to herein as substrate 0001/LP′/1004, where LP′ as used in this CM1-CM2 substrate is the amino acid sequence GG. In some embodiments, the CM1-CM2 substrate includes the sequence GLSGRSDNHGGVHMPLGFLGP (SEQ ID NO: 1971), which is also referred to herein as substrate 0001/LP′/1003, where LP′ as used in this CM1-CM2 substrate is the amino acid sequence GG.

[0369] In some embodiments, the CM is a substrate for at least two proteases. In some embodiments, each protease is selected from the group consisting of those shown in Table 3. In some embodiments, the CM is a substrate for at least two proteases, wherein one of the proteases is selected from the group consisting of a MMP, thrombin, a neutrophil elastase, a cysteine protease, uPA, legumain and matriptase and the other protease is selected from the group consisting of those shown in Table 3. In some embodiments, the CM is a substrate for at least two proteases selected from the group consisting of a MMP, thrombin, a neutrophil elastase, a cysteine protease, uPA, legumain and matriptase.

[0370] In some embodiments, the activatable antibody includes at least a first CM and a second CM. In some embodiments, the first CM and the second CM are each polypeptides of no more than 15 amino acids long. In some embodiments, the first CM and the second CM in the activatable antibody in the uncleaved state have the structural arrangement from N-terminus to C-terminus as follows: MM-CM1-CM2-AB or AB-CM2-CM1-MM. In some embodiments, at least one of the first CM and the second CM is a polypeptide that functions as a substrate for a protease selected from the group consisting of a MMP, thrombin, a neutrophil elastase, a cysteine protease, uPA, legumain, and matriptase. In some embodiments, the first CM is cleaved by a first cleaving agent selected from the group consisting of a MMP, thrombin, a neutrophil elastase, a cysteine protease, uPA, legumain, and matriptase in a target tissue and the second CM is cleaved by a second cleaving agent in a target tissue. In some embodiments, the other protease is selected from the group consisting of those shown in Table 3. In some embodiments, the first cleaving agent and the second cleaving agent are the same protease selected from the group consisting of a MMP, thrombin, a neutrophil elastase, a cysteine protease, uPA, legumain, and matriptase, and the first CM and the second CM are different substrates for the enzyme. In some embodiments, the first cleaving agent and the second cleaving agent are the same protease selected from the group consisting of those shown in Table 3. In some embodiments, the first cleaving agent and the second cleaving agent are different proteases. In some embodiments, the first cleaving agent and the second cleaving agent are co-localized in the target tissue. In some embodiments, the first CM and the second CM are cleaved by at least one cleaving agent in the target tissue.

[0371] In some embodiments, the activatable antibody is exposed to and cleaved by a protease such that, in the activated or cleaved state, the activated antibody includes a light chain amino acid sequence that includes at least a portion of LP2 and/or CM sequence after the protease has cleaved the CM.

[0372] In some embodiments, the activatable antibody also includes an agent conjugated to the AB. In some embodiments, the agent conjugated to the AB or the AB of an activatable antibody is a therapeutic agent. In some embodiments, the agent is conjugated to the AB via a cleavable linker. In some embodiments, the agent is conjugated to the AB via a linker that includes at least one CM1-CM2 substrate sequence. In some embodiments, the agent is conjugated to the AB via a noncleavable linker.

[0373] In some embodiments, the agent is an anti-inflammatory agent.

[0374] In some embodiments, the activatable antibody also includes a detectable moiety. In some embodiments, the detectable moiety is a diagnostic agent.

[0375] In some embodiments, the activatable antibody also includes a signal peptide. In some embodiments, the signal peptide is conjugated to the activatable antibody via a spacer. In some embodiments, the spacer is conjugated to the activatable antibody in the absence of a signal peptide. In some embodiments, the spacer is joined directly to the MM of the activatable antibody. In some embodiments, the spacer is joined directly to the MM of the activatable antibody in the structural arrangement from N-terminus to C-terminus of spacer-MM-CM-AB. An example of a spacer joined directly to the N-terminus of MM of the activatable antibody is selected from the group consisting of QGQSGQG (SEQ ID NO: 362), QGQSGQ (SEQ ID NO: 913), QGQSG (SEQ ID NO: 914), QGQS (SEQ ID NO: 915), QGQ (SEQ ID NO: 916), QG (SEQ ID NO: 917), and Q. Additional examples of spacers include GQSGQG (SEQ ID NO: 2042), QSGQG (SEQ ID NO: 2043), SGQG (SEQ ID NO: 2044), GQG (SEQ ID NO: 2045), QG (SEQ ID NO: 2046), and G. In some embodiments, the spacer includes at least the amino acid sequence QGQSGQG (SEQ ID NO: 362). In some embodiments, the spacer includes at least the amino acid sequence QGQSGQ (SEQ ID NO: 913). In some embodiments, the spacer includes at least the amino acid sequence QGQSG (SEQ ID NO: 914). In some embodiments, the spacer includes at least the amino acid sequence QGQS (SEQ ID NO: 915), In some embodiments, the spacer includes at least the amino acid sequence QGQ (SEQ ID NO: 916). In some embodiments, the spacer includes at least the amino acid sequence QG (SEQ ID NO: 917). In some embodiments, the spacer includes at least the amino acid residue Q. In some embodiments, the spacer includes at least the amino acid sequence GQSGQG (SEQ ID NO: 2042). In some embodiments, the spacer includes at least the amino acid sequence QSGQG (SEQ ID NO: 2043). In some embodiments, the spacer includes at least the amino acid sequence SGQG (SEQ ID NO: 2044). In some embodiments, the spacer includes at least the amino acid sequence GQG (SEQ ID NO: 2045). In some embodiments, the spacer includes at least the amino acid sequence QG (SEQ ID NO: 2046). In some embodiments, the spacer includes at least the amino acid sequence G. In some embodiments, the activatable antibody does not include a spacer sequence.

[0376] In some embodiments, the AB of the activatable antibody naturally contains one or more disulfide bonds. In some embodiments, the AB can be engineered to include one or more disulfide bonds.

[0377] In some embodiments, the serum half-life of the activatable antibody is longer than that of the corresponding antibody; e.g., the pK of the activatable antibody is longer than that of the corresponding antibody. In some embodiments, the serum half-life of the activatable antibody is similar to that of the corresponding antibody. In some embodiments, the serum half-life of the activatable antibody is at least 15 days when administered to an organism. In some embodiments, the serum half-life of the activatable antibody is at least 12 days when administered to an organism. In some embodiments, the serum half-life of the activatable antibody is at least 11 days when administered to an organism. In some embodiments, the serum half-life of the activatable antibody is at least 10 days when administered to an organism. In some embodiments, the serum half-life of the activatable antibody is at least 9 days when administered to an organism. In some embodiments, the serum half-life of the activatable antibody is at least 8 days when administered to an organism. In some embodiments, the serum half-life of the activatable antibody is at least 7 days when administered to an organism. In some embodiments, the serum half-life of the activatable antibody is at least 6 days when administered to an organism. In some embodiments, the serum half-life of the activatable antibody is at least 5 days when administered to an organism. In some embodiments, the serum half-life of the activatable antibody is at least 4 days when administered to an organism. In some embodiments, the serum half-life of the activatable antibody is at least 3 days when administered to an organism. In some embodiments, the serum half-life of the activatable antibody is at least 2 days when administered to an organism. In some embodiments, the serum half-life of the activatable antibody is at least 24 hours when administered to an organism. In some embodiments, the serum half-life of the activatable antibody is at least 20 hours when administered to an organism. In some embodiments, the serum half-life of the activatable antibody is at least 18 hours when administered to an organism. In some embodiments, the serum half-life of the activatable antibody is at least 16 hours when administered to an organism. In some embodiments, the serum half-life of the activatable antibody is at least 14 hours when administered to an organism. In some embodiments, the serum half-life of the activatable antibody is at least 12 hours when administered to an organism. In some embodiments, the serum half-life of the activatable antibody is at least 10 hours when administered to an organism. In some embodiments, the serum half-life of the activatable antibody is at least 8 hours when administered to an organism. In some embodiments, the serum half-life of the activatable antibody is at least 6 hours when administered to an organism. In some embodiments, the serum half-life of the activatable antibody is at least 4 hours when administered to an organism. In some embodiments, the serum half-life of the activatable antibody is at least 3 hours when administered to an organism.

[0378] In some embodiments, the activatable anti-PD-1 antibody is monospecific.

[0379] In some embodiments, the activatable anti-PD-1 antibody is multispecific, e.g., by way of non-limiting example, bispecific or trifunctional. In some embodiments, the activatable anti-PD-1 antibody is formulated as part of a pro-Bispecific T Cell Engager (BITE) molecule, i.e., the BITE includes a masking moiety and a cleavable moiety. In some embodiments, the activatable anti-PD-1 antibody is formulated as part of a pro-Chimeric Antigen Receptor (CAR) modified T cell, modified NK cell, or other modified immune effector cell. In some embodiments, an activatable anti-PD-1 antibody is formulated as part of another engineered receptor on an immune effector cell; i.e., the pro-CAR or other pro-engineered receptor includes a masking moiety and a cleavable moiety.

[0380] In some embodiments, the activatable antibody or antigen-binding fragment thereof is incorporated in a multispecific activatable antibody or antigen-binding fragment thereof, where at least one arm of the multispecific activatable antibody specifically binds PD-1. In some embodiments, the activatable antibody or antigen-binding fragment thereof is incorporated in a bispecific activatable antibody or antigen-binding fragment thereof, where at least one arm of the bispecific activatable antibody specifically binds PD-1.

[0381] In some embodiments, at least one arm of the multispecific activatable antibody, e.g., a bispecific activatable antibody, comprises a heavy chain amino acid sequence selected from the group consisting of SEQ ID NO: 1, 5, 9, 13, 17, 21, 23, 25, 27, 29, 31, 33, 35, and 37. In some embodiments, at least one arm of the multispecific activatable antibody, e.g., a bispecific activatable antibody, comprises a heavy chain amino acid sequence selected from the group consisting of SEQ ID NO: 21, 23, 25, 27, 29, 31, 33, 35, and 37.

[0382] In some embodiments, at least one arm of the multispecific activatable antibody, e.g., a bispecific activatable antibody, comprises a light chain amino acid sequence selected from the group consisting of SEQ ID NO: 3, 7, 11, 15, 19, 39, 41, 43, 45, 47, 49, 51, 53, 55, 57, and 59. In some embodiments, at least one arm of the multispecific activatable antibody, e.g., a bispecific activatable antibody, comprises a light chain amino acid sequence selected from the group consisting of SEQ ID NO: 39, 41, 43, 45, 47, 49, Si, 53, 55, 57, and 59.

[0383] In some embodiments, at least one arm of the multispecific activatable antibody, e.g., a bispecific activatable antibody, a heavy chain amino acid sequence comprising an amino acid sequence selected from the group consisting of SEQ ID NO: 1, 5, 9, 13, 17, 21, 23, 25, 27, 29, 31, 33, 35, and 37, and a light chain amino acid sequence selected from the group consisting of SEQ ID NO: 3, 7, 11, 15, 19, 39, 41, 43, 45, 47, 49, Si, 53, 55, 57, and 59. In some embodiments, at least one arm of the multispecific activatable antibody, e.g., a bispecific activatable antibody, a heavy chain amino acid sequence comprising an amino acid sequence selected from the group consisting of SEQ ID NO: 21, 23, 25, 27, 29, 31, 33, 35, and 37, and a light chain amino acid sequence selected from the group consisting of SEQ ID NO: 39, 41, 43, 45, 47, 49, Si, 53, 55, 57, and 59. In some embodiments, at least one arm of the multispecific activatable antibody, e.g., a bispecific activatable antibody, includes a heavy chain that comprises or is derived from amino acid sequence SEQ ID NO: 21. In some embodiments, at least one arm of the multispecific activatable antibody, e.g., a bispecific activatable antibody, includes a light chain that comprises or is derived from amino acid sequence SEQ ID NO: 45 or SEQ ID NO: 47. In some embodiments, at least one arm of the multispecific activatable antibody, e.g., a bispecific activatable antibody, includes a heavy chain that comprises or is derived from amino acid sequence SEQ ID NO: 21 and a light chain that comprises or is derived from amino acid sequence SEQ ID NO: 45 or SEQ ID NO: 47. In some embodiments, at least one arm of the multispecific activatable antibody, e.g., a bispecific activatable antibody, includes a heavy chain that comprises or is derived from amino acid sequence SEQ ID NO: 21 and a light chain that comprises or is derived from amino acid sequence SEQ ID NO: 45. In some embodiments, at least one arm of the multispecific activatable antibody, e.g., a bispecific activatable antibody, includes a heavy chain that comprises or is derived from amino acid sequence SEQ ID NO: 21 and a light chain that comprises or is derived from amino acid sequence SEQ ID NO: 47.

[0384] In some embodiments, at least one arm of the multispecific activatable antibody, e.g., a bispecific activatable antibody, includes the combination of the complementarity determining region (CDR) sequences of the heavy chain amino acid sequence of SEQ ID NO: 21. In some embodiments, at least one arm of the multispecific activatable antibody, e.g., a bispecific activatable antibody, includes the combination of the CDR sequences of the light chain amino acid sequence of SEQ ID NO: 45 or of SEQ ID NO: 47. In some embodiments, at least one arm of the multispecific activatable antibody, e.g., a bispecific activatable antibody, includes a combination of the CDR sequences of the heavy chain amino acid sequence of SEQ ID NO: 21, and the CDR sequences of the light chain amino acid sequence of SEQ ID NO: 45 or 47. In some embodiments, at least one arm of the multispecific activatable antibody, e.g., a bispecific activatable antibody, includes a combination of the CDR sequences of the heavy chain amino acid sequence of SEQ ID NO: 21, and the CDR sequences of the light chain amino acid sequence of SEQ ID NO: 45. In some embodiments, at least one arm of the multispecific activatable antibody, e.g., a bispecific activatable antibody, includes a combination of the CDR sequences of the heavy chain amino acid sequence of SEQ ID NO: 21, and the CDR sequences of the light chain amino acid sequence of SEQ ID NO: 47.

[0385] In some embodiments, at least one arm of the multispecific activatable antibody, e.g., a bispecific activatable antibody includes: (a) a variable heavy chain complementarity determining region 1 (VH CDR1) comprising an amino acid sequence selected from the group consisting of SEQ ID NOs: 653-657; (b) a variable heavy chain complementarity determining region 2 (VH CDR2) comprising an amino acid sequence selected from the group consisting of SEQ ID NOs: 658-663; (c) a variable heavy chain complementarity determining region 3 (VH CDR3) comprising an amino acid sequence selected from the group consisting of SEQ ID NOs: 664-668; (d) a variable light chain complementarity determining region 1 (VL CDR1) comprising an amino acid sequence selected from the group consisting of SEQ ID NOs:669-677; (e) a variable light chain complementarity determining region 2 (VL CDR2) comprising an amino acid sequence selected from the group consisting of SEQ ID NOs: 678-682; and (f) variable light chain complementarity determining region 3 (VL CDR3) comprising an amino acid sequence selected from the group consisting of SEQ ID NOs: 683-687

[0386] In some embodiments, at least one arm of the multispecific activatable antibody, e.g., a bispecific activatable antibody, includes a combination of a variable heavy chain complementarity determining region 1 (VH CDR1, also referred to herein as CDRH1) sequence, a variable heavy chain complementarity determining region 2 (VH CDR2, also referred to herein as CDRH2) sequence, and a variable heavy chain complementarity determining region 3 (VH CDR3, also referred to herein as CDRH3) sequence, wherein the VH CDR1 sequence comprises GFTFSGYAMS (SEQ ID NO: 653); the VH CDR2 sequence comprises YISNSGGNAH (SEQ ID NO: 658); and the VH CDR3 sequence comprises EDYGTSPFVY (SEQ ID NO: 664).

[0387] In some embodiments, at least one arm of the multispecific activatable antibody, e.g., a bispecific activatable antibody, includes a combination of a variable light chain complementarity determining region 1 (VL CDR1, also referred to herein as CDRL1) sequence, a variable light chain complementarity determining region 2 (VL CDR2, also referred to herein as CDRL2) sequence, and a variable light chain complementarity determining region 3 (VL CDR3, also referred to herein as CDRL3) sequence, wherein the VL CDR1 sequence comprises RASESVDSYGISFMN (SEQ ID NO: 675) or RASESVDAYGISFMN (SEQ ID NO:676); the VL CDR2 sequence comprises AASNQGS (SEQ ID NO: 678); and the VL CDR3 sequence comprises QQSKDVPWT (SEQ ID NO: 683). In some embodiments, at least one arm of the multispecific activatable antibody, e.g., a bispecific activatable antibody, includes a combination of a VL CDR1 sequence, a VL CDR2 sequence, and a VL CDR3 sequence, wherein the VL CDR1 sequence comprises RASESVDSYGISFMN (SEQ ID NO: 675); the VL CDR2 sequence comprises AASNQGS (SEQ ID NO: 678); and the VL CDR3 sequence comprises QQSKDVPWT (SEQ ID NO: 683). In some embodiments, at least one arm of the multispecific activatable antibody, e.g., a bispecific activatable antibody, includes a combination of a VL CDR1 sequence, a VL CDR2 sequence, and a VL CDR3 sequence, wherein the VL CDR1 sequence comprises RASESVDAYGISFMN (SEQ ID NO:676); the VL CDR2 sequence comprises AASNQGS (SEQ ID NO: 678); and the VL CDR3 sequence comprises QQSKDVPWT (SEQ ID NO: 683).

[0388] In some embodiments, at least one arm of the multispecific activatable antibody, e.g., a bispecific activatable antibody, includes a combination of a VH CDR1 sequence, a VH CDR2 sequence, a VH CDR3 sequence, a VL CDR1 sequence, a VL CDR2 sequence, and a VL CDR3 sequence, wherein the VH CDR1 sequence comprises GFTFSGYAMS (SEQ ID NO: 653); the VH CDR2 sequence comprises YISNSGGNAH (SEQ ID NO: 658); and the VH CDR3 sequence comprises EDYGTSPFVY (SEQ ID NO: 664); the VL CDR1 sequence comprises RASESVDSYGISFMN (SEQ ID NO: 675) or RASESVDAYGISFMN (SEQ ID NO:676); the VL CDR2 sequence comprises AASNQGS (SEQ ID NO: 678); and the VL CDR3 sequence comprises QQSKDVPWT (SEQ ID NO: 683). In some embodiments, at least one arm of the multispecific activatable antibody, e.g., a bispecific activatable antibody, includes a combination of a VH CDR1 sequence, a VH CDR2 sequence, a VH CDR3 sequence, a VL CDR1 sequence, a VL CDR2 sequence, and a VL CDR3 sequence, wherein the VH CDR1 sequence comprises GFTFSGYAMS (SEQ ID NO: 653); the VH CDR2 sequence comprises YISNSGGNAH (SEQ ID NO: 658); and the VH CDR3 sequence comprises EDYGTSPFVY (SEQ ID NO: 664); the VL CDR1 sequence comprises RASESVDSYGISFMN (SEQ ID NO: 675); the VL CDR2 sequence comprises AASNQGS (SEQ ID NO: 678); and the VL CDR3 sequence comprises QQSKDVPWT (SEQ ID NO: 683). In some embodiments, at least one arm of the multispecific activatable antibody, e.g., a bispecific activatable antibody, includes a combination of a VH CDR1 sequence, a VH CDR2 sequence, a VH CDR3 sequence, a VL CDR1 sequence, a VL CDR2 sequence, and a VL CDR3 sequence, wherein the VH CDR1 sequence comprises GFTFSGYAMS (SEQ ID NO: 653); the VH CDR2 sequence comprises YISNSGGNAH (SEQ ID NO: 658); and the VH CDR3 sequence comprises EDYGTSPFVY (SEQ ID NO: 664); the VL CDR1 sequence comprises RASESVDAYGISFMN (SEQ ID NO:676); the VL CDR2 sequence comprises AASNQGS (SEQ ID NO: 678); and the VL CDR3 sequence comprises QQSKDVPWT (SEQ ID NO: 683).

[0389] In some embodiments, at least one arm of the multispecific activatable antibody, e.g., a bispecific activatable antibody, includes a heavy chain that comprises or is derived from the amino acid sequence of SEQ ID NO: 1346, and a light chain that comprises or is derived from the amino acid sequence of SEQ ID NO: 626.

[0390] In some embodiments, at least one arm of the multispecific activatable antibody, e.g., a bispecific activatable antibody, includes a heavy chain that comprises or is derived from the amino acid sequence of SEQ ID NO: 1514, and a light chain that comprises or is derived from the amino acid sequence of SEQ ID NO: 638.

[0391] In some embodiments, at least one arm of the multispecific activatable antibody, e.g., a bispecific activatable antibody, includes the combination of the complementarity determining region (CDR) sequences of the heavy chain amino acid sequence of SEQ ID NO: 1346. In some embodiments, at least one arm of the multispecific activatable antibody, e.g., a bispecific activatable antibody, includes the combination of the CDR sequences of the light chain amino acid sequence of SEQ ID NO: 626. In some embodiments, at least one arm of the multispecific activatable antibody, e.g., a bispecific activatable antibody, includes a combination of the CDR sequences of the heavy chain amino acid sequence of SEQ ID NO: 1346, and the CDR sequences of the light chain amino acid sequence of SEQ ID NO: 626.

[0392] In some embodiments, at least one arm of the multispecific activatable antibody, e.g., a bispecific activatable antibody, includes a combination of a variable heavy chain complementarity determining region 1 (VH CDR1, also referred to herein as CDRH1) sequence, a variable heavy chain complementarity determining region 2 (VH CDR2, also referred to herein as CDRH2) sequence, and a variable heavy chain complementarity determining region 3 (VH CDR3, also referred to herein as CDRH3) sequence, wherein the VH CDR1 sequence comprises GITFSNSG (SEQ ID NO: 1705); the VH CDR2 sequence comprises IWYDGSKR (SEQ ID NO: 1706); and the VH CDR3 sequence comprises TNDDY (SEQ ID NO: 1707).

[0393] In some embodiments, at least one arm of the multispecific activatable antibody, e.g., a bispecific activatable antibody, includes a combination of a variable light chain complementarity determining region 1 (VL CDR1, also referred to herein as CDRL1) sequence, a variable light chain complementarity determining region 2 (VL CDR2, also referred to herein as CDRL2) sequence, and a variable light chain complementarity determining region 3 (VL CDR3, also referred to herein as CDRL3) sequence, wherein the VL CDR1 sequence comprises QSVSSY (SEQ ID NO: 1708); the VL CDR2 sequence comprises DAS (SEQ ID NO: 1709); and the VL CDR3 sequence comprises QQSSNWPRT (SEQ ID NO: 1710).

[0394] In some embodiments, at least one arm of the multispecific activatable antibody, e.g., a bispecific activatable antibody, includes a combination of a VH CDR1 sequence, a VH CDR2 sequence, a VH CDR3 sequence, a VL CDR1 sequence, a VL CDR2 sequence, and a VL CDR3 sequence, wherein the VH CDR1 sequence comprises GITFSNSG (SEQ ID NO: 1705); the VH CDR2 sequence comprises IWYDGSKR (SEQ ID NO: 1706); the VH CDR3 sequence comprises TNDDY (SEQ ID NO: 1707); the VL CDR1 sequence comprises QSVSSY (SEQ ID NO: 1708); the VL CDR2 sequence comprises DAS (SEQ ID NO: 1709); and the VL CDR3 sequence comprises QQSSNWPRT (SEQ ID NO: 1710).

[0395] In some embodiments, at least one arm of the multispecific activatable antibody, e.g., a bispecific activatable antibody, includes the combination of the complementarity determining region (CDR) sequences of the heavy chain amino acid sequence of SEQ ID NO: 1514. In some embodiments, at least one arm of the multispecific activatable antibody, e.g., a bispecific activatable antibody, includes the combination of the CDR sequences of the light chain amino acid sequence of SEQ ID NO: 638. In some embodiments, at least one arm of the multispecific activatable antibody, e.g., a bispecific activatable antibody, includes a combination of the CDR sequences of the heavy chain amino acid sequence of SEQ ID NO: 1514, and the CDR sequences of the light chain amino acid sequence of SEQ ID NO: 638.

[0396] In some embodiments, at least one arm of the multispecific activatable antibody, e.g., a bispecific activatable antibody, includes a combination of a variable heavy chain complementarity determining region 1 (VH CDR1, also referred to herein as CDRH1) sequence, a variable heavy chain complementarity determining region 2 (VH CDR2, also referred to herein as CDRH2) sequence, and a variable heavy chain complementarity determining region 3 (VH CDR3, also referred to herein as CDRH3) sequence, wherein the VH CDR1 sequence comprises GYTFTNYY (SEQ ID NO: 1711); the VH CDR2 sequence comprises INPSNGGT (SEQ ID NO: 1712); and the VH CDR3 sequence comprises RRDYRFDMGFDY (SEQ ID NO: 1713).

[0397] In some embodiments, at least one arm of the multispecific activatable antibody, e.g., a bispecific activatable antibody, includes a combination of a variable light chain complementarity determining region 1 (VL CDR1, also referred to herein as CDRL1) sequence, a variable light chain complementarity determining region 2 (VL CDR2, also referred to herein as CDRL2) sequence, and a variable light chain complementarity determining region 3 (VL CDR3, also referred to herein as CDRL3) sequence, wherein the VL CDR1 sequence comprises KGVSTSGYSY (SEQ ID NO: 1714); the VL CDR2 sequence comprises LAS (SEQ ID NO: 1715); and the VL CDR3 sequence comprises QHSRDLPLT (SEQ ID NO: 1716).

[0398] In some embodiments, at least one arm of the multispecific activatable antibody, e.g., a bispecific activatable antibody, includes a combination of a VH CDR1 sequence, a VH CDR2 sequence, a VH CDR3 sequence, a VL CDR1 sequence, a VL CDR2 sequence, and a VL CDR3 sequence, wherein the VH CDR1 sequence comprises GYTFTNYY (SEQ ID NO: 1711); the VH CDR2 sequence comprises INPSNGGT (SEQ ID NO: 1712); the VH CDR3 sequence comprises RRDYRFDMGFDY (SEQ ID NO: 1713); the VL CDR1 sequence comprises KGVSTSGYSY (SEQ ID NO: 1714); the VL CDR2 sequence comprises LAS (SEQ ID NO: 1715); and the VL CDR3 sequence comprises QHSRDLPLT (SEQ ID NO: 1716).

[0399] In some embodiments, at least one arm of the multispecific activatable antibody, e.g., a bispecific activatable antibody, comprises a heavy chain amino acid sequence that is at least 90%, 91%, 92%, 93%, 94%, 95%, 96%, 97%, 98% or 99% identical to an amino acid sequence selected from the group consisting of SEQ ID NO: 1, 5, 9, 13, 17, 21, 23, 25, 27, 29, 31, 33, 35, and 37. In some embodiments, at least one arm of the multispecific activatable antibody, e.g., a bispecific activatable antibody, comprises a heavy chain amino acid sequence that is at least 90%, 91%, 92%, 93%, 94%, 95%, 96%, 97%, 98% or 99% identical to an amino acid sequence selected from the group consisting of SEQ ID NO: 21, 23, 25, 27, 29, 31, 33, 35, and 37.

[0400] In some embodiments, at least one arm of the multispecific activatable antibody, e.g., a bispecific activatable antibody, comprises a light chain amino acid that is at least 90%, 91%, 92%, 93%, 94%, 95%, 96%, 97%, 98% or 99% identical to an amino acid sequence selected from the group consisting of SEQ ID NO: 39, 41, 43, 45, 47, 49, 51, 53, 55, 57, and 59.

[0401] In some embodiments, at least one arm of the multispecific activatable antibody, e.g., a bispecific activatable antibody, comprises a heavy chain amino acid sequence that is at least 90%, 91%, 92%, 93%, 94%, 95%, 96%, 97%, 98% or 99% identical to an amino acid sequence selected from the group consisting of SEQ ID NO: 1, 5, 9, 13, 17, 21, 23, 25, 27, 29, 31, 33, 35, and 37, and a light chain amino acid that is at least 90%, 91%, 92%, 93%, 94%, 95%, 96%, 97%, 98% or 99% identical to an amino acid sequence selected from the group consisting of SEQ ID NO: 3, 7, 11, 15, 19, 39, 41, 43, 45, 47, 49, 51, 53, 55, 57, and 59. In some embodiments, at least one arm of the multispecific activatable antibody, e.g., a bispecific activatable antibody, comprises a heavy chain amino acid sequence that is at least 90%, 91%, 92%, 93%, 94%, 95%, 96%, 97%, 98% or 99% identical to an amino acid sequence selected from the group consisting of SEQ ID NO: 21, 23, 25, 27, 29, 31, 33, 35, and 37, and a light chain amino acid that is at least 90%, 91%, 92%, 93%, 94%, 95%, 96%, 97%, 98% or 99% identical to an amino acid sequence selected from the group consisting of SEQ ID NO: 39, 41, 43, 45, 47, 49, 51, 53, 55, 57, and 59.

[0402] In some embodiments, at least one arm of the multispecific activatable antibody, e.g., a bispecific activatable antibody, includes a heavy chain amino acid sequence that is at least 90%, 91%, 92%, 93%, 94%, 95%, 96%, 97%, 98% or 99% identical to the amino acid sequence of SEQ ID NO: 1346, and a light chain amino acid that is at least 90%, 91%, 92%, 93%, 94%, 95%, 96%, 97%, 98% or 99% identical to the amino acid sequence of SEQ ID NO: 626.

[0403] In some embodiments, at least one arm of the multispecific activatable antibody, e.g., a bispecific activatable antibody, includes a heavy chain amino acid sequence that is at least 90%, 91%, 92%, 93%, 94%, 95%, 96%, 97%, 98% or 99% identical to the amino acid sequence of SEQ ID NO: 1514, and a light chain amino acid that is at least 90%, 91%, 92%, 93%, 94%, 95%, 96%, 97%, 98% or 99% identical to the amino acid sequence of SEQ ID NO: 638.

[0404] In some embodiments, at least one arm of the multispecific activatable antibody, e.g., a bispecific activatable antibody, comprises a combination of a variable heavy chain complementarity determining region 1 (VH CDR1, also referred to herein as CDRH1) sequence, a variable heavy chain complementarity determining region 2 (VH CDR2, also referred to herein as CDRH2) sequence, a variable heavy chain complementarity determining region 3 (VH CDR3, also referred to herein as CDRH3) sequence, a variable light chain complementarity determining region 1 (VL CDR1, also referred to herein as CDRL1) sequence, a variable light chain complementarity determining region 2 (VL CDR2, also referred to herein as CDRL2) sequence, and a variable light chain complementarity determining region 3 (VL CDR3, also referred to herein as CDRL3) sequence, wherein at least one CDR sequence is selected from the group consisting of a VH CDR1 sequence shown in Table 8; a VH CDR2 sequence shown in Table 8; a VH CDR3 sequence shown in Table 8; a VL CDR1 sequence shown in Table 8; a VL CDR2 sequence shown in Table 8; and a VL CDR3 sequence shown in Table 8.

[0405] In some embodiments, at least one arm of the multispecific activatable antibody, e.g., a bispecific activatable antibody, comprises a combination of a VH CDR1 sequence, a VH CDR2 sequence, a VH CDR3 sequence, a VL CDR1 sequence, a VL CDR2 sequence, and a VL CDR3 sequence, wherein at least one CDR sequence is selected from the group consisting of a VH CDR1 sequence that includes a sequence that is at least 90%, 91%, 92%, 93%, 94%, 95%, 96%, 97%, 98%, 99% or more identical to a VH CDR1 sequence shown in Table 8; a VH CD2 sequence that includes a sequence that is at least 90%, 91%, 92%, 93%, 94%, 95%, 96%, 97%, 98%, 99% or more identical to a VH CDR2 sequence shown in Table 8; a VH CDR3 sequence that includes a sequence that is at least 90%, 91%, 92%, 93%, 94%, 95%, 96%, 97%, 98%, 99% or more identical to a VH CDR3 sequence shown in Table 8; a VL CDR1 sequence that includes a sequence that is at least 90%, 91%, 92%, 93%, 94%, 95%, 96%, 97%, 98%, 99% or more identical to a VL CDR1 sequence shown in Table 8; a VL CDR2 sequence that includes a sequence that is at least 90%, 91%, 92%, 93%, 94%, 95%, 96%, 97%, 98%, 99% or more identical to a VL CDR2 sequence shown in Table 8; and a VL CDR3 sequence that includes a sequence that is at least 90%, 91%, 92%, 93%, 94%, 95%, 96%, 97%, 98%, 99% or more identical to a VL CDR3 sequence shown in Table 8.

[0406] In some embodiments, at least one arm of the multispecific activatable antibody, e.g., a bispecific activatable antibody, comprises a combination of a VH CDR1 sequence, a VH CDR2 sequence, a VH CDR3 sequence shown in a single row in Table 8, and a VL CDR1 sequence, a VL CDR2 sequence, and a VL CDR3 sequence shown in a single row in Table 8.

[0407] In some embodiments, the antibody comprises a heavy chain that comprises a combination of a VH CDR1 sequence, a VH CDR2 sequence, and a VH CDR3 sequence, wherein the combination is a combination of the three heavy chain CDR sequences (VH CDR1, VH CDR2, VH CDR3) shown in a single row in Table 8.

[0408] In some embodiments, at least one arm of the multispecific activatable antibody, e.g., a bispecific activatable antibody, comprises a combination of a VH CDR1 sequence, a VH CDR2 sequence, a VH CDR3 sequence shown in a single row in Table 8, and a VL CDR1 sequence, a VL CDR2 sequence, and a VL CDR3 sequence shown in a single row in Table 8, wherein each CDR sequence in the combination comprises a sequence that is at least 90%, 91%, 92%, 93%, 94%, 95%, 96%, 97%, 98%, 99% or more identical to the corresponding VH CDR sequence shown in a single row in Table 8 and the corresponding VL CDR sequence shown in a single row in Table 8.

[0409] In some embodiments, the antibody comprises a heavy chain that comprises a combination of a VH CDR1 sequence, a VH CDR2 sequence, and a VH CDR3 sequence, wherein each CDR sequence in the combination comprises a sequence that is at least 90%, 91%, 92%, 93%, 94%, 95%, 96%, 97%, 98%, 99% or more identical to the corresponding CDR sequence in a combination of three heavy chain CDR sequences (VH CDR1, VH CDR2, VH CDR3) shown in a single row in Table 8.

[0410] In some embodiments, the anti-PD-1 antibodies and/or activatable anti-PD-1 antibodies described herein are used in conjunction with one or more additional agents or a combination of additional agents. Suitable additional agents include other experimental anti-cancer agents in development for specific applications, current pharmaceutical and/or surgical therapies for an intended application, such as, for example, cancer. For example, the anti-PD-1 antibodies and/or activatable anti-PD-1 antibodies can be used in conjunction with an additional chemotherapeutic or anti-neoplastic agent.

[0411] In some embodiments, the additional agent includes at least one experimental anti-cancer agent in development for specific applications. In some embodiments, the additional agent includes at least one agent that is already approved for one indication but is being tested in another. In some embodiments, the additional agent includes at least one agent that is not currently approved in any indication but is being tested in one or more indications for the purposes of obtaining regulatory approval. In some embodiments, the additional agent includes at least one agent that is a pharmaceutical therapy for an intended application. In some embodiments, the additional agent includes at least one agent that is a surgical therapy for cancer. In some embodiments, the additional agent includes at least one agent that is a pharmaceutical therapy for an intended application. In some embodiments, the additional agent includes at least one agent that is a surgical therapy for cancer. In some embodiments, the additional agent is a chemotherapeutic agent. In some embodiments, the additional agent is an anti-neoplastic agent. In some embodiments, the additional agents are a combination of any two or more of these agents.

[0412] In some embodiments, the additional agent(s) is a chemotherapeutic agent, such as a chemotherapeutic agent selected from the group consisting of docetaxel, paclitaxel, abraxane (i.e., albumin-conjugated paclitaxel), doxorubicin, oxaliplatin, carboplatin, cisplatin, irinotecan, and gemcitabine.

[0413] In some embodiments, the additional agent(s) is a checkpoint inhibitor, a kinase inhibitor, an agent targeting inhibitors in the tumor microenvironment, and/or a T cell or NK agonist. In some embodiments, the additional agent(s) is radiation therapy, alone or in combination with another additional agent(s) such as a chemotherapeutic or anti-neoplastic agent. In some embodiments, the additional agent(s) is a vaccine, an oncovirus, and/or a DC-activating agent such as, by way of non-limiting example, a toll-like receptor (TLR) agonist and/or α-CD40. In some embodiments, the additional agent(s) is a tumor-targeted antibody designed to kill the tumor via ADCC or via direct conjugation to a toxin (e.g., an antibody drug conjugate (ADC).

[0414] In some embodiments, the checkpoint inhibitor is an inhibitor of a target selected from the group consisting of CTLA-4, LAG-3, PD-1, PD-1, TIGIT, TIM-3, B7H4, BTLA, and Vista. In some embodiments, the kinase inhibitor is selected from the group consisting of B-RAFi, MEKi, and Btk inhibitors, such as ibrutinib. In some embodiments, the kinase inhibitor is crizotinib. In some embodiments, the B-RAF inhibitor is vemurafenib. In some embodiments, the tumor microenvironment inhibitor is selected from the group consisting of an IDO inhibitor, an α-CSF1R inhibitor, an α-CCR4 inhibitor, a TGF-beta, a myeloid-derived suppressor cell, or a T-regulatory cell. In some embodiments, the agonist is selected from the group consisting of Ox40, GITR, CD137, ICOS, CD27, and HVEM.

[0415] In some embodiments, the inhibitor is a CTLA-4 inhibitor. In some embodiments, the inhibitor is a LAG-3 inhibitor. In some embodiments, the inhibitor is a PD-1 inhibitor. In some embodiments, the inhibitor is a PD-1 inhibitor. In some embodiments, the inhibitor is a TIGIT inhibitor. In some embodiments, the inhibitor is a TIM-3 inhibitor. In some embodiments, the inhibitor is a B7H4 inhibitor. In some embodiments, the inhibitor is a Vista inhibitor. In some embodiments, the inhibitor is a B-RAFi inhibitor. In some embodiments, the inhibitor is a MEKi inhibitor. In some embodiments, the inhibitor is a Btk inhibitor. In some embodiments, the inhibitor is ibrutinib. In some embodiments, the inhibitor is crizotinib. In some embodiments, the inhibitor is an DO inhibitor. In some embodiments, the inhibitor is an α-CSF1R inhibitor. In some embodiments, the inhibitor is an α-CCR4 inhibitor. In some embodiments, the inhibitor is a TGF-beta. In some embodiments, the inhibitor is a myeloid-derived suppressor cell. In some embodiments, the inhibitor is a T-regulatory cell.

[0416] In some embodiments, the agonist is Ox40. In some embodiments, the agonist is GITR. In some embodiments, the agonist is CD137. In some embodiments, the agonist is ICOS. In some embodiments, the agonist is CD27. In some embodiments, the agonist is HVEM.

[0417] In some embodiments, the anti-PD-1 antibody and/or activatable antibody is administered during and/or after treatment in combination with one or more additional agents such as, for example, a chemotherapeutic agent, an anti-inflammatory agent, and/or an immunosuppressive agent. In some embodiments, the anti-PD-1 antibody and/or activatable anti-PD-1 antibody and the additional agent are formulated into a single therapeutic composition, and the anti-PD-1 antibody and/or activatable anti-PD-1 antibody and additional agent are administered simultaneously. Alternatively, the anti-PD-1 antibody and/or activatable anti-PD-1 antibody and additional agent are separate from each other, e.g., each is formulated into a separate therapeutic composition, and the anti-PD-1 antibody and/or activatable anti-PD-1 antibody and the additional agent are administered simultaneously, or the anti-PD-1 antibody and/or activatable anti-PD-1 antibody and the additional agent are administered at different times during a treatment regimen. For example, the anti-PD-1 antibody and/or activatable anti-PD-1 antibody is administered prior to the administration of the additional agent, the anti-PD-1 antibody and/or activatable anti-PD-1 antibody is administered subsequent to the administration of the additional agent, or the anti-PD-1 antibody and/or activatable anti-PD-1 antibody and the additional agent are administered in an alternating fashion. As described herein, the anti-PD-1 antibody and/or activatable anti-PD-1 antibody and additional agent are administered in single doses or in multiple doses.

[0418] In some embodiments, the anti-PD-1 antibody and/or activatable anti-PD-1 antibody and the additional agent(s) are administered simultaneously. For example, the anti-PD-1 antibody and/or activatable anti-PD-1 antibody and the additional agent(s) can be formulated in a single composition or administered as two or more separate compositions. In some embodiments, the anti-PD-1 antibody and/or activatable anti-PD-1 antibody and the additional agent(s) are administered sequentially, or the anti-PD-1 antibody and/or activatable anti-PD-1 antibody and the additional agent are administered at different times during a treatment regimen.

[0419] In some embodiments, the anti-PD-1 antibody and/or activatable anti-PD-1 antibody is administered during and/or after treatment in combination with one or more additional agents such as, by way of non-limiting example, a chemotherapeutic agent, an anti-inflammatory agent, and/or an immunosuppressive agent, such as an alkylating agent, an anti-metabolite, an anti-microtubule agent, a topoisomerase inhibitor, a cytotoxic antibiotic, and/or any other nucleic acid damaging agent. In some embodiments, the additional agent is a taxane, such as paclitaxel (e.g., Abraxane®). In some embodiments, the additional agent is an anti-metabolite, such as gemcitabine. In some embodiments, the additional agent is an alkylating agent, such as platinum-based chemotherapy, such as carboplatin or cisplatin. In some embodiments, the additional agent is a targeted agent, such as a kinase inhibitor, e.g., sorafenib or erlotinib. In some embodiments, the additional agent is a targeted agent, such as another antibody, e.g., a monoclonal antibody (e.g., bevacizumab), a bispecific antibody, or a multispecific antibody. In some embodiments, the additional agent is a proteosome inhibitor, such as bortezomib or carfilzomib. In some embodiments, the additional agent is an immune modulating agent, such as lenolidominde or IL-2. In some embodiments, the additional agent is radiation. In some embodiments, the additional agent is an agent considered standard of care by those skilled in the art. In some embodiments, the additional agent is a chemotherapeutic agent well known to those skilled in the art.

[0420] In some embodiments, the additional agent is another antibody or antigen-binding fragment thereof and/or another activatable antibody or antigen-binding fragment thereof. In some embodiments the additional agent is another antibody or antigen-binding fragment thereof and/or another activatable antibody or antigen-binding fragment thereof against the same target as the first antibody or antigen-binding fragment thereof and/or an activatable antibody or antigen-binding fragment thereof, e.g., against PD-1. In some embodiments the additional agent is another antibody or antigen-binding fragment thereof and/or another activatable antibody or antigen-binding fragment thereof against a target different than the target of the first antibody or antigen-binding fragment thereof, the first conjugated antibody or antigen-binding fragment thereof and/or activatable antibody or antigen-binding fragment thereof.

[0421] As a non-limiting example, the antibody or antigen-binding fragment and/or the AB of an activatable antibody is a binding partner for any target listed in Table 1.

TABLE 1
Exemplary Targets

| | | | | | |
|---|---|---|---|---|---|
| 1-92-LFA-3 | CD52 | DL44 | HVEM | LIF-R | STEAP1 |
| Alpha-4 | CD56 | DLK1 | Hyaluronidase | Lewis X | STEAP2 |
| integrin | | | | | |
| Alpha-V | CD64 | DLL4 | ICOS | LIGHT | TAG-72 |
| integrin | | | | | |
| alpha4beta1 | CD70 | DPP-4 | IFNalpha | LRP4 | TAPA1 |
| integrin | | | | | |
| alpha4beta7 | CD71 | DSG1 | IFNbeta | LRRC26 | TGFbeta |
| integrin | | | | | |
| AGR2 | CD74 | EGFR | IFNgamma | MCSP | TIGIT |
| Anti-Lewis-Y | | EGFRviii | IgE | Mesothelin | TIM-3 |
| Apelin J | CD80 | Endothelin B | IgE Receptor | MRP4 | TLR2 |
| receptor | | receptor | (FceRI) | | |
| | | (ETBR) | | | |
| APRIL | CD81 | ENPP3 | IGF | MUC1 | TLR4 |
| B7-H4 | CD86 | EpCAM | IGF1R | Mucin-16 | TLR6 |
| | | | | (MUC16, | |
| | | | | CA-125) | |
| BAFF | CD95 | EPHA2 | IL1B | Na/K ATPase | TLR7 |
| BTLA | CD117 | EPHB2 | IL1R | Neutrophil | TLR8 |
| | | | | elastase | |
| C5 | CD125 | ERBB3 | IL2 | NGF | TLR9 |
| complement | | | | | |
| C-242 | CD132 | F protein of | IL11 | Nicastrin | TMEM31 |
| | (IL-2RG) | RSV | | | |
| CA9 | CD133 | FAP | IL12 | Notch | TNFalpha |
| | | | | Receptors | |
| CA19-9 | CD137 | FGF-2 | IL12p40 | Notch 1 | TNFR |
| (Lewis a) | | | | | |
| Carbonic | CD138 | FGF8 | IL-12R, | Notch 2 | TNFRS12 |
| anhydrase 9 | | | IL-12Rbetal | | A |
| CD2 | CD166 | FGFR1 | IL13 | Notch 3 | TRAIL-R1 |
| CD3 | CD172A | FGFR2 | IL13R | Notch 4 | TRAIL-R2 |
| CD6 | CD248 | FGFR3 | IL15 | NOV | Transferrin |
| CD9 | CDH6 | FGFR4 | IL17 | OSM-R | Transferrin |
| | | | | | receptor |
| CD11a | CEACAM5 | Folate | IL18 | OX-40 | TRK-A |
| | (CEA) | receptor | | | |
| CD19 | CEACAM6 | GAL3ST1 | IL21 | PAR2 | TRK-B |
| | (NCA-90) | | | | |
| CD20 | CLAUDIN-3 | G-CSF | IL23 | PDGF-AA | uPAR |
| CD22 | CLAUDIN-4 | G-CSFR | IL23R | PDGF-BB | VAP1 |
| CD24 | cMet | GD2 | IL27/IL27R | PDGFRalpha | VCAM-1 |
| | | | (wsx1) | | |
| CD25 | Collagen | GITR | IL29 | PDGFRbeta | VEGF |
| CD27 | Cripto | GLUT1 | IL-31R | PD-1 | VEGF-A |
| CD28 | CSFR | GLUT4 | IL31/IL31R | PD-L1 | VEGF-B |
| CD30 | CSFR-1 | GM-CSF | IL2R | PD-L2 | VEGF-C |
| CD33 | CTLA-4 | GM-CSFR | IL4 | Phosphatidyl- | VEGF-D |
| | | | | serine | |
| CD38 | CTGF | GP IIb/IIIa | IL4R | P1GF | VEGFR1 |
| | | receptors | | | |
| CD40 | CXCL10 | Gp130 | IL6, IL6R | PSCA | VEGFR2 |
| CD40L | CXCL13 | GPIIB/IIIA | Insulin | PSMA | VEGFR3 |
| | | | Receptor | | |
| CD41 | CXCR1 | GPNMB | Jagged | RAAG12 | VISTA |
| | | | Ligands | | |
| CD44 | CXCR2 | GRP78 | Jagged 1 | RAGE | WISP-1 |
| CD44v6 | | HER2/neu | Jagged 2 | sLC44A4 | WISP-2 |
| CD47 | CXCR4 | HGF | LAG-3 | Sphingosine 1 | WISP-3 |
| | | | | Phosphate | |
| CD51 | CYR61 | hGH | | | |

[0422] As a non-limiting example, the antibody or antigen-binding fragment and/or the AB of an activatable antibody is or is derived from an antibody listed in Table 2.

TABLE 2
Exemplary sources for Abs

| Antibody Trade Name (antibody name) | Target |
|---|---|
| Avastin ™ (bevacizumab) | VEGF |
| Lucentis ™ (ranibizumab) | VEGF |
| Erbitux ™ (cetuximab) | EGFR |
| Vectibix ™ (panitumumab) | EGFR |
| Remicade ™ (infliximab) | TNFα |
| Humira ™ (adalimumab) | TNFα |
| Tysabri ™ (natalizumab) | Integrinα4 |
| Simulect ™ (basiliximab) | IL2R |
| Soliris ™ (eculizumab) | Complement C5 |
| Raptiva ™ (efalizumab) | CD11a |
| Bexxar ™ (tositumomab) | CD20 |
| Zevalin ™ (ibritumomab tiuxetan) | CD20 |
| Rituxan ™ (rituximab) | CD20 |
| Ocrelizumab | CD20 |
| Arzerra ™ (ofatumumab) | CD20 |
| Gazyva ™ (Obinutuzumab) | CD20 |
| Zenapax ™ (daclizumab) | CD25 |
| Adcetris ™ (brentuximab vedotin) | CD30 |
| Myelotarg ™ (gemtuzumab) | CD33 |
| Mylotarg ™ (gemtuzumab ozogamicin) | CD33 |
| Campath ™ (alemtuzumab) | CD52 |
| ReoPro ™ (abiciximab) | Glycoprotein receptor IIb/IIIa |
| Xolair ™ (omalizumab) | IgE |
| Herceptin ™ (trastuzumab) | Her2 |
| Kadcyla ™ (trastuzumab emtansine) | Her2 |
| Synagis ™ (palivizumab) | F protein of RSV |
| (ipilimumab) | CTLA-4 |
| (tremelimumab) | CTLA-4 |
| Hu5c8 | CD40L |
| (pertuzumab) | Her2-neu |
| (ertumaxomab) | CD3/Her2-neu |
| Orencia ™ (abatacept) | CTLA-4 |
| (tanezumab) | NGF |
| (bavituximab) | Phosphatidylserine |
| (zalutumumab) | EGFR |
| (mapatumumab) | EGFR |
| (matuzumab) | EGFR |
| (nimotuzumab) | EGFR |
| ICR62 | EGFR |
| mAb 528 | EGFR |
| CH806 | EGFR |
| MDX-447 | EGFR/CD64 |
| (edrecolomab) | EpCAM |
| RAV12 | RAAG12 |
| huJ591 | PSMA |
| Enbrel ™ (etanercept) | TNF-R |
| Amevive ™ (alefacept) | 1-92-LFA-3 |
| Antril ™, Kineret ™ (ankinra) | IL-1Ra |
| GC1008 | TGFbeta |
| | Notch, e.g., Notch 1 |
| | Jagged 1 or Jagged 2 |
| (adecatumumab) | EpCAM |
| (figitumumab) | IGF1R |
| (tocilizumab) | IL-6 receptor |
| Stelara ™ (ustekinumab) | IL-12/IL-23 |
| Prolia ™ (denosumab) | RANKL |

[0423] In some embodiments, the additional antibody or antigen binding fragment thereof and/or activatable antibody or antigen binding fragment thereof is a monoclonal antibody, domain antibody, single chain, Fab fragment, a F(ab′)₂ fragment, a scFv, a scAb, a dAb, a single domain heavy chain antibody, or a single domain light chain antibody. In some embodiments, the additional antibody or antigen binding fragment thereof and/or activatable antibody or antigen binding fragment thereof is a mouse, other rodent, chimeric, humanized or fully human monoclonal antibody.

[0424] The disclosure also provides methods of producing an anti-PD-1 antibody and/or activatable anti-PD-1 antibody polypeptide by culturing a cell under conditions that lead to expression of the polypeptide, wherein the cell comprises an isolated nucleic acid molecule encoding an antibody and/or an activatable antibody described herein, and/or vectors that include these isolated nucleic acid sequences. The disclosure provides methods of producing an antibody and/or activatable antibody by culturing a cell under conditions that lead to expression of the antibody and/or activatable antibody, wherein the cell comprises an isolated nucleic acid molecule encoding an antibody and/or an activatable antibody described herein, and/or vectors that include these isolated nucleic acid sequences.

[0425] The invention also provides a method of manufacturing activatable antibodies that in an activated state binds PD-1 by (a) culturing a cell comprising a nucleic acid construct that encodes the activatable antibody under conditions that lead to expression of the activatable antibody, wherein the activatable antibody comprises a masking moiety (MM), a cleavable moiety (CM), and an antibody or an antigen binding fragment thereof (AB) that specifically binds PD-1, (i) wherein the CM is a polypeptide that functions as a substrate for a protease; and (ii) wherein the CM is positioned in the activatable antibody such that, when the activatable antibody is in an uncleaved state, the MM interferes with specific binding of the AB to PD-1 and in a cleaved state the MM does not interfere or compete with specific binding of the AB to PD-1; and (b) recovering the activatable antibody. Suitable AB, MM, and/or CM include any of the AB, MM, and/or CM disclosed herein.

[0426] In some embodiments, the activatable antibody in the uncleaved state has the structural arrangement from N-terminus to C-terminus as follows: MM-CM-AB or AB-CM-MM. In some embodiments, the activatable antibody comprises a linking peptide between the MM and the CM. In some embodiments, the activatable antibody comprises a linking peptide between the CM and the AB. In some embodiments, the activatable antibody comprises a first linking peptide (LP1) and a second linking peptide (LP2), and wherein the activatable antibody in the uncleaved state has the structural arrangement from N-terminus to C-terminus as follows: MM-LP1-CM-LP2-AB or AB-LP2-CM-LP1-MM. In some embodiments, the activatable antibody in the uncleaved state has the structural arrangement from N-terminus to C-terminus as follows: spacer-MM-LP1-CM-LP2-AB or AB-LP2-CM-LP1-MM-spacer.

[0427] In some embodiments, the two linking peptides need not be identical to each other.

[0428] In some embodiments, at least one of LP1 or LP2 comprises an amino acid sequence selected from the group consisting of (GS)ₙ, (GGS)ₙ, (GSGGS)ₙ (SEQ ID NO: 363) and (GGGS)ₙ (SEQ ID NO: 364), where n is an integer of at least one.

[0429] In some embodiments, at least one of LP1 or LP2 comprises an amino acid sequence selected from the group consisting of GGSG (SEQ ID NO: 365), GGSGG (SEQ ID NO: 366), GSGSG (SEQ ID NO: 367), GSGGG (SEQ ID NO: 368), GGGSG (SEQ ID NO: 369), and GSSSG (SEQ ID NO: 370).

[0430] In some embodiments, LP1 comprises the amino acid sequence GSSGGSGGSGGSG (SEQ ID NO: 371), GSSGGSGGSGG (SEQ ID NO: 372), GSSGGSGGSGGS (SEQ ID NO: 373), GSSGGSGGSGGSGGGS (SEQ ID NO: 374), GSSGGSGGSG (SEQ ID NO: 375), GSSGGSGGSGS (SEQ ID NO: 376), GGGSSGGS (SEQ ID NO: 65), or GGGSSGG (SEQ ID NO: 1040).

[0431] In some embodiments, LP2 comprises the amino acid sequence GSS, GGS, GGGS (SEQ ID NO: 377), GSSGT (SEQ ID NO: 378) or GSSG (SEQ ID NO: 379).

[0432] The invention provides methods of preventing, delaying the progression of, treating, alleviating a symptom of, or otherwise ameliorating a disorder or disease in a subject by administering to a subject in need thereof a therapeutically effective amount of an anti-PD-1 antibody, conjugated anti-PD-1 antibody, activatable anti-PD-1 antibody and/or conjugated activatable anti-PD-1 antibody described herein.

[0433] The invention also provides a method of reducing immune suppression comprising administering to a subject in need thereof a therapeutically effective amount of an anti-PD-1 antibody and/or activatable anti-PD-1 antibody described herein. In some embodiments, the immune suppression is suppression of T cell activity. In some embodiments, the immune suppression is mediated by engagement of PD-1 on T cells to PD-L1 or PD-L2 on tumor cells or other immune cells. In some embodiments, the invention provides a method to reduce or inhibit binding of PD-L1 (also referred to herein as PDL1) and/or PD-L2 (also referred to herein as PDL2), to PD-1 on T cells. The ligands PD-L1 and/or PD-L2 are often found on tumor cells or other immune cells.

[0434] The invention also provides methods of preventing, delaying the progression of, treating, alleviating a symptom of, or otherwise ameliorating cancer in a subject by administering a therapeutically effective amount of an anti-PD-1 antibody and/or activatable anti-PD-1 antibody described herein to a subject in need thereof. PD-1 is known to be expressed on immune cells, such as T cells, in a variety of cancers, such as, by way of non-limiting example, melanoma, non-small cell lung cancer, nasopharyngeal cancer, glioblastoma/mixed glioma, colon adenocarcinoma, hepatocellular carcinoma, urothelial cancer, multiple myeloma, ovarian cancer, gastric carcinoma, esophageal cancer, pancreatic cancer, renal cell carcinoma (RCC), breast cancer, lymphomas, such as Hodgkin's lymphoma, and leukemias. (See e.g., Chen et al., “Molecular Pathways: Next-Generation Immunotherapy Inhibiting Programmed Death-Ligand 1 and Programmed Death-1,” Clin. Can. Res., vol. 18: 6580-6587 (2012), the contents of which are hereby incorporated by reference in their entirety).

[0435] In some embodiments, the cancer is a bladder cancer, a bone cancer, a breast cancer, a carcinoid, a cervical cancer, a cholangiocarcinoma, a colon cancer, an endometrial cancer, a glioma, a head and neck cancer, a liver cancer, a lung cancer, a lymphoma, such as Hodgkin's lymphoma, a melanoma, an ovarian cancer, a pancreatic cancer, a prostate cancer, a renal cancer, a sarcoma, a skin cancer, a stomach cancer, a testis cancer, a thymus cancer, a thyroid cancer, a urogenital cancer, and/or a urothelial cancer.

[0436] In some embodiments, the cancer is selected from the group consisting of melanoma (MEL), renal cell carcinoma (RCC), squamous non-small cell lung cancer (NSCLC), non-squamous NSCLC, colorectal cancer (CRC), castration-resistant prostate cancer (CRPC), hepatocellular carcinoma (HCC), squamous cell carcinoma of the head and neck, thymoma, carcinomas of the esophagus, ovary, gastrointestinal tract and breast, or a hematologic malignancy such as multiple myeloma, B-cell lymphoma, T-cell lymphoma, Hodgkin's lymphoma, primary mediastinal B-cell lymphoma, and chronic myelogenous leukemia.

[0437] The invention also provides methods of treating cancer patients with an autoimmune or inflammatory disease by administering a therapeutically effective amount of an anti-PD-1 antibody and/or activatable anti-PD-1 antibody described herein to a subject in need thereof. In some embodiments, the autoimmune disease is colitis, RA, pancreatitis, diabetes, or pneumonitis.

[0438] An anti-PD-1 antibody and/or an activatable anti-PD-1 antibody used in any of the embodiments of these methods and uses can be administered at any stage of the disease. For example, such an anti-PD-1 antibody and/or activatable anti-PD-1 antibody can be administered to a patient suffering cancer of any stage, from early to metastatic. The terms subject and patient are used interchangeably herein.

[0439] In some embodiments, the subject is a mammal, such as a human, non-human primate, companion animal (e.g., cat, dog, horse), farm animal, work animal, or zoo animal. In some embodiments, the subject is a human. In some embodiments, the subject is a companion animal. In some embodiments, the subject is an animal in the care of a veterinarian.

[0440] The anti-PD-1 antibody and/or activatable anti-PD-1 antibody and therapeutic formulations thereof are administered to a subject suffering from or susceptible to a disease or disorder associated with immune suppression, such as immune suppression mediated by engagement of PD-1 on T cells by PD-L1 or PD-L2 on tumor cells or other immune cells. In some embodiments, the immune suppression is suppression of T cell activity. A subject suffering from or susceptible to a disease or disorder associated with such immune suppression is identified using any of a variety of methods known in the art. For example, subjects suffering from cancer or other neoplastic condition are identified using any of a variety of clinical and/or laboratory tests such as, physical examination and blood, urine and/or stool analysis to evaluate health status. For example, subjects suffering from inflammation and/or an inflammatory disorder are identified using any of a variety of clinical and/or laboratory tests such as physical examination and/or bodily fluid analysis, e.g., blood, urine and/or stool analysis, to evaluate health status.

[0441] Administration of an anti-PD-1 antibody and/or activatable anti-PD-1 antibody to a patient suffering from a disease or disorder associated with immune suppression, such as immune suppression mediated by engagement of PD-1 on T cells by PD-L1 or PD-L2 on tumor cells or other immune cells, is considered successful if any of a variety of laboratory or clinical objectives is achieved. For example, administration of an anti-PD-1 antibody, and/or activatable anti-PD-1 antibody to a patient suffering from a disease or disorder associated with such immune suppression is considered successful if one or more of the symptoms associated with the disease or disorder is alleviated, reduced, inhibited or does not progress to a further, i.e., worse, state. Administration of an anti-PD-1 antibody and/or conjugated activatable anti-PD-1 antibody to a patient suffering from a disease or disorder associated with immune suppression, such as immune suppression mediated by engagement of PD-1 on T cells to PD-L1 or PD-L2 on tumor cells or other immune cells, is considered successful if the disease or disorder enters remission or does not progress to a further, i.e., worse, state.

[0442] In some embodiments, the anti-PD-1 antibody and/or conjugated activatable anti-PD-1 antibody is administered during and/or after treatment in combination with one or more additional agents such as, for example, a chemotherapeutic agent, an anti-inflammatory agent, and/or an immunosuppressive agent. In some embodiments, the anti-PD-1 antibody and/or activatable anti-PD-1 antibody and the additional agent(s) are administered simultaneously. For example, the anti-PD-1 antibody and/or activatable anti-PD-1 antibody and the additional agent(s) can be formulated in a single composition or administered as two or more separate compositions. In some embodiments, the anti-PD-1 antibody and/or activatable anti-PD-1 antibody and the additional agent(s) are administered sequentially.

[0443] The invention also provides methods and kits for using the activatable anti-PD-1 antibodies in a variety of diagnostic and/or prophylactic indications. For example, the invention provides methods and kits for detecting the presence or absence of a cleaving agent and a target of interest in a subject or a sample by (i) contacting a subject or sample with an anti-PD-1 activatable antibody, wherein the anti-PD-1 activatable antibody comprises a masking moiety (MINI), a cleavable moiety (CM) that is cleaved by the cleaving agent, and an antigen binding domain or fragment thereof (AB) that specifically binds the target of interest, wherein the anti-PD-1 activatable antibody in an uncleaved, non-activated state comprises a structural arrangement from N-terminus to C-terminus as follows: MM-CM-AB or AB-CM-MM; (a) wherein the MM is a peptide that inhibits binding of the AB to PD-1, and wherein the MM does not have an amino acid sequence of a naturally occurring binding partner of the AB and is not a modified form of a natural binding partner of the AB; and (b) wherein, when the AB is in an uncleaved, non-activated state, the MM interferes with specific binding of the AB to PD-1, and when the AB is in a cleaved, activated state the MM does not interfere or compete with specific binding of the AB to PD-1; and (ii) measuring a level of activated anti-PD-1 activatable antibody in the subject or sample, wherein a detectable level of activated anti-PD-1 activatable antibody in the subject or sample indicates that the cleaving agent and PD-1 are present in the subject or sample and wherein no detectable level of activated anti-PD-1 activatable antibody in the subject or sample indicates that the cleaving agent, PD-1 or both the cleaving agent and PD-1 are absent in the subject or sample.

[0444] In some embodiments, the activatable anti-PD-1 antibody is an activatable anti-PD-1 antibody to which a therapeutic agent is conjugated. In some embodiments, the activatable anti-PD-1 antibody is not conjugated to an agent. In some embodiments, the activatable anti-PD-1 antibody comprises a detectable label. In some embodiments, the detectable label is positioned on the AB. In some embodiments, measuring the level of activatable anti-PD-1 antibody in the subject or sample is accomplished using a secondary reagent that specifically binds to the activated antibody, wherein the reagent comprises a detectable label. In some embodiments, the secondary reagent is an antibody comprising a detectable label.

[0445] In some embodiments of these methods and kits, the activatable anti-PD-1 antibody includes a detectable label. In some embodiments of these methods and kits, the detectable label includes an imaging agent, a contrasting agent, an enzyme, a fluorescent label, a chromophore, a dye, one or more metal ions, or a ligand-based label. In some embodiments of these methods and kits, the imaging agent comprises a radioisotope. In some embodiments of these methods and kits, the radioisotope is indium or technetium. In some embodiments of these methods and kits, the contrasting agent comprises iodine, gadolinium or iron oxide. In some embodiments of these methods and kits, the enzyme comprises horseradish peroxidase, alkaline phosphatase, or β-galactosidase. In some embodiments of these methods and kits, the fluorescent label comprises yellow fluorescent protein (YFP), cyan fluorescent protein (CFP), green fluorescent protein (GFP), modified red fluorescent protein (mRFP), red fluorescent protein tdimer2 (RFP tdimer2), HCRED, or a europium derivative. In some embodiments of these methods and kits, the luminescent label comprises an N-methylacrydium derivative. In some embodiments of these methods, the label comprises an Alexa Fluor® label, such as Alex Fluor® 680 or Alexa Fluor® 750. In some embodiments of these methods and kits, the ligand-based label comprises biotin, avidin, streptavidin or one or more haptens.

[0446] In some embodiments of these methods and kits, the subject is a mammal. In some embodiments of these methods, the subject is a human. In some embodiments, the subject is a non-human mammal, such as a non-human primate, companion animal (e.g., cat, dog, horse), farm animal, work animal, or zoo animal. In some embodiments, the subject is a rodent.

[0447] In some embodiments of these methods and kits, the method is an in vivo method. In some embodiments of these methods, the method is an in situ method. In some embodiments of these methods, the method is an ex vivo method. In some embodiments of these methods, the method is an in vitro method.

[0448] In some embodiments of the methods and kits, the method is used to identify or otherwise refine a patient population suitable for treatment with an anti-PD-1 activatable antibody of the disclosure, followed by treatment by administering that activatable anti-PD-1 antibody to a subject in need thereof. For example, patients that test positive for both the target (e.g., PD-1) and a protease that cleaves the substrate in the cleavable moiety (CM) of the anti-PD-1 activatable antibody being tested in these methods are identified as suitable candidates for treatment with such an anti-PD-1 activatable antibody comprising such a CM, and the patient is then administered a therapeutically effective amount of the activatable anti-PD-1 antibody that was tested. Likewise, patients that test negative for either or both of the target (e.g., PD-1) and the protease that cleaves the substrate in the CM in the activatable antibody being tested using these methods might be identified as suitable candidates for another form of therapy. In some embodiments, such patients can be tested with other anti-PD-1 activatable antibodies until a suitable anti-PD-1 activatable antibody for treatment is identified (e.g., an anti-PD-1 activatable antibody comprising a CM that is cleaved by the patient at the site of disease). In some embodiments, the patient is then administered a therapeutically effective amount of the activatable anti-PD-1 antibody for which the patient tested positive. Suitable AB, MM, and/or CM include any of the AB, MM, and/or CM disclosed herein.

[0449] Pharmaceutical compositions according to the invention can include an antibody of the invention and a carrier. These pharmaceutical compositions can be included in kits, such as, for example, diagnostic kits.

### BRIEF DESCRIPTION OF THE DRAWINGS

[0450] FIG. 1 is graph depicting the results of an ELISA binding assay using various murine antibodies that bind human PD-1 (i.e., anti-hPD-1 antibodies) referred to herein as 245-M3, also referred to herein as M3 (VH: SEQ ID NO: 9; VL: SEQ ID NO: 11), 245-M5, also referred to herein as M5 (VH: SEQ ID NO: 13; VL: SEQ ID NO: 15), 136-M13, also referred to herein as M13 (VH: SEQ ID NO: 1; VL: SEQ ID NO: 3), 136-M19, also referred to herein as M19 (VH: SEQ ID NO: 5; VL: SEQ ID NO: 7), and 136-M14, also referred to herein as M14 (VH: SEQ ID NO: 17; VL: SEQ ID NO: 19). The anti-PD-1 antibodies nivolumab (also referred to herein as “nivo” or “NV1”) and pembrolizumab (also referred to herein as “pembro” or “PM1” or “PM1 AB”) were used as positive controls.

[0451] FIG. 2 is a series of graphs demonstrating that various murine anti-hPD-1 antibodies block binding of the ligands human PD-L1 (hPD-L1) and human PD-L2 (hPD-L2) to human PD-1.

[0452] FIG. 3 is a series of graphs demonstrating that various murine anti-hPD-1 antibodies block binding of the ligands human PD-L1 (hPD-L1) and human PD-L2 (hPD-L2) to human PD-1.

[0453] FIG. 4 is a graph depicting binding to human PD-1 of various anti-hPD-1 antibodies of the disclosure referred to herein as A1.0 (VH: SEQ ID NO: 21; VL: SEQ ID NO: 39), A1.2 (VH: SEQ ID NO: 21; VL: SEQ ID NO: 43), and A1.4 (VH: SEQ ID NO: 21; VL: SEQ ID NO: 45) as determined by ELISA. The anti-PD-1 antibody pembrolizumab (“PM1”) was used as positive control.

[0454] FIG. 5 is a graph depicting binding to human PD-1 of various anti-hPD-1 antibodies of the disclosure referred to herein as A1.5 (VH: SEQ ID NO: 21; VL: SEQ ID NO: 47), A1.6 (VH: SEQ ID NO: 21; VL: SEQ ID NO: 49), Ba2 (VH: SEQ ID NO: 29; VL: SEQ ID NO: 57), Bb2 (VH: SEQ ID NO: 31; VL: SEQ ID NO: 57), C1.1 (VH: SEQ ID NO: 33; VL: SEQ ID NO: 41), and D4 (VH: SEQ ID NO: 37; VL: SEQ ID NO: 59) as determined by ELISA. The anti-PD-1 antibodies nivolumab (“NV1”) and pembrolizumab (“PM1”) were used as positive controls.

[0455] FIG. 6 is a series of graphs depicting the ability of various anti-hPD-1 antibodies of the disclosure referred to herein as A1.0, A1.2, and A1.4 to inhibit binding between human PD-1 (hPD-1) and both human PDL-1 (hPDL-1) and human PDL-2 (hPDL-2) as determined by ELISA. The anti-PD-1 antibody pembrolizumab (“PM1”) was used as positive control.

[0456] FIG. 7 is a series of graphs depicting the ability of various anti-hPD-1 antibodies of the disclosure referred to herein as A1.5 and C1.1 to inhibit binding between hPD-1 and both hPDL-1 and hPDL-2 as determined by ELISA. The anti-PD-1 antibodies nivolumab (“NV1”) and pembrolizumab (“PM1”) were used as positive controls.

[0457] FIG. 8 is a graph depicting the ability of various anti-hPD-1 antibodies of the disclosure referred to herein as A1.5, Ba2, Bb2, C1.1, and D4 to inhibit binding between hPD-1 and hPDL-1 as determined by ELISA. The anti-PD-1 antibodies nivolumab (“NV1”) and pembrolizumab (“PM1”) were used as positive controls.

[0458] FIG. 9 is a graph depicting the ability of various anti-hPD-1 antibodies of the disclosure referred to herein as A1.5, Ba2, Bb2, C1.1, and D4 to inhibit binding between hPD-1 and hPDL-2 as determined by ELISA. The anti-PD-1 antibodies nivolumab (“NV1”) and pembrolizumab (“PM1”) were used as positive controls.

[0459] FIG. 10 is a graph depicting that the anti-PD-1 antibody referred to herein as A1.5 specifically binds hPD-1 as determined by ELISA. The A1.5 anti-PD-1 antibody was tested against a panel of human and mouse proteins.

[0460] FIGS. 11A and 11B are a series of graphs depicting the ability of the anti-PD-1 antibody A1.5 to block Fab fragments of the anti-PD-1 antibodies nivolumab (“NV1”) and pembrolizumab (“PM1”) from binding to PD-1. These graphs also demonstrate that the anti-PD-1 antibody A1.5 binds a distinct epitope from either NV1 and/or PM1.

[0461] FIG. 12 is a graph demonstrating that the anti-PD-1 antibody A1.5 has a potency similar to that of nivolumab (“NV1”) and pembrolizumab (“PM1”) measured in a T-cell restimulation assay. In FIG. 12, PMBCs were treated as follows: PBMCs: CMV+ HemaCare Donor C were plated at 2×10⁵ cells/well; stimulated with 5 μg/mL CMV lysate+/− anti-PD-1 or isotype control; IFN-γ ELISA assay performed on day 4 supernatant.

[0462] FIG. 13 is a series of graphs demonstrating that the anti-PD-1 antibodies A1.5 and Ba2 bind monomeric human PD-1 (hPD1) with similar or higher affinity than the anti-PD-1 antibodies nivolumab (“Nivo”) and pembrolizumab (“Pembro”).

[0463] FIG. 14 is a series of graphs depicting the binding to human PD-1 by anti-PD-1 antibody A1.4 and by various activatable anti-PD-1 antibodies that include the various masking moieties referred to herein as PD01 (SEQ ID NO: 66), PD02 (SEQ ID NO: 67), PD03 (SEQ ID NO: 68), PD08 (SEQ ID NO: 73), PD09 (SEQ ID NO: 74), and PD10 (SEQ ID NO: 75) as determined by ELISA.

[0464] FIG. 15 is a series of graphs depicting the binding to hPD-1 by anti-PD-1 antibody A1.5 and by various activatable anti-PD-1 antibodies that include the anti-PD-1 antibody A1.5 and the masking moieties referred to herein as PD01 (SEQ ID NO: 66), PD02 (SEQ ID NO: 67), PD03 (SEQ ID NO: 68), PD05 (SEQ ID NO: 70), PD06 (SEQ ID NO: 71) (Plate 1); PD08 (SEQ ID NO: 73), PD09 (SEQ ID NO: 74), PD10 (SEQ ID NO: 75), PD11 (SEQ ID NO: 76), PD12 (SEQ ID NO: 77) (Plate 2); PD13 (SEQ ID NO: 78), PD14 (SEQ ID NO: 79), PD15 (SEQ ID NO: 80), PD16 (SEQ ID NO: 81), PD17 (SEQ ID NO: 82) (Plate 3); PD18 (SEQ ID NO: 83), PD19 (SEQ ID NO: 84), PD20 (SEQ ID NO: 85), PD21 (SEQ ID NO: 86), PD22 (SEQ ID NO: 87) (Plate 4); and PD23 (SEQ ID NO: 88), PD24 (SEQ ID NO: 89) (Plate 5).

[0465] FIG. 16 is a graph depicting the binding to hPD-1 by anti-PD-1 antibody A1.5 and various activatable anti-PD-1 antibodies that include the anti-PD-1 antibody A1.5, the cleavable moiety referred to herein as 3001, which includes the sequence AVGLLAPPGGLSGRSDNH (SEQ ID NO: 318), and the masking moieties referred to herein as PD02, PD12, and PD16.

[0466] FIG. 17 is a series of graphs depicting the binding to hPD-1 by the anti-PD-1 antibody A1.5 and by various activatable anti-PD-1 antibodies that include the anti-PD-1 antibody A1.5, the cleavable moiety referred to herein as 2001, which includes the sequence ISSGLLSGRSDNH (SEQ ID NO: 214), and the masking moieties referred to herein as PD05 (SEQ ID NO: 70), PD06 (SEQ ID NO: 71), PD09 (SEQ ID NO: 74) (upper left panel); PD12 (SEQ ID NO: 77), PD23 (SEQ ID NO: 88), PD25 (SEQ ID NO: 90) (upper right panel); PD26 (SEQ ID NO: 91), PD27 (SEQ ID NO: 92), PD28 (SEQ ID NO: 93) (lower left panel); and PD30 (SEQ ID NO: 95), PD33 (SEQ ID NO: 98), PD35 (SEQ ID NO: 100) (lower right panel).

[0467] FIG. 18 is a series of graphs depicting the binding to hPD-1 by the anti-PD-1 antibody A1.5 and by various activatable anti-PD-1 antibodies that include the anti-PD-1 antibody A1.5 and the masking moieties referred to herein as PD34 (SEQ ID NO: 99), PD06 (SEQ ID NO: 71), PD09 (SEQ ID NO: 74) (upper left panel); PD34 (SEQ ID NO: 99), PD12 (SEQ ID NO: 77), PD17 (SEQ ID NO: 82) (upper right panel); PD34 (SEQ ID NO: 99), PD19 (SEQ ID NO: 84), PD25 (SEQ ID NO: 90) (lower left panel); and PD34 (SEQ ID NO: 99), PD26 (SEQ ID NO: 91), PD28 (SEQ ID NO: 93) (lower right panel).

[0468] FIG. 19 is a graph depicting the ability of anti-PD1 A1.5 activatable antibodies of the disclosure to increase CMV-stimulated IFN-gamma secretion as compared to control hIgG4, but with decreased potency relative to anti-PD1 A1.5 parental antibody. The tested activatable antibodies include the anti-PD-1 antibody A1.5, the cleavable moiety referred to herein as 2001, and the masking moieties referred to herein as PD06, PD05, PD11, PD12, PD14, and PD19. In FIG. 19, PMBCs were treated as follows: PBMCs: CMV+ HemaCare Donor C were plated at 2×10⁵ cells/well; stimulated with 5 μg/mL CMV lysate+/− anti-PD-1 or isotype control; IFN-γ ELISA assay performed on day 4 supernatant.

[0469] FIGS. 20A and 20B are a series of graphs depicting the ability of the anti-PD-1 antibody referred to herein as J43v2 (Heavy Chain (HC): SEQ ID NO: 546; Light Chain (LC): SEQ ID NO: 543) to block murine PD-L1 (mPD-L1) and murine PD-L2 (mPD-L2) from binding to cells expressing murine PD-1 (mPD-1) with single digit nM EC₅₀ values.

[0470] FIG. 21 is a graph depicting the dose-dependent induction of diabetes in NOD mice by the antibody referred to herein as J43v2 m2a (HC: SEQ ID NO: 546; LC: SEQ ID NO: 543).

[0471] FIG. 22 is a series of graphs depicting the binding to hPD-1 by anti-PD-1 antibody J43v2 m2a and by various activatable anti-PD-1 antibodies that include the anti-PD-1 antibody J43v2 m2a and the masking moieties referred to herein as MP01 (SEQ ID NO: 384), MP02 (SEQ ID NO: 385), MP03 (SEQ ID NO: 386), MP04 (SEQ ID NO: 387), MP05 (SEQ ID NO: 388) (upper left panel); MP06 (SEQ ID NO: 389), MP07 (SEQ ID NO: 390), MP08 (SEQ ID NO: 391), MP09 (SEQ ID NO: 392), MP10, also referred to herein as MP010 (SEQ ID NO: 393) (upper right panel); MP11, also referred to herein as MP011 (SEQ ID NO: 394), MP12, also referred to herein as MP012 (SEQ ID NO: 395), MP13, also referred to herein as MP013 (SEQ ID NO: 396), MP14, also referred to herein as MP014 (SEQ ID NO: 397) (bottom panel).

[0472] FIG. 23 is a graph depicting the binding to hPD-1 by the anti-PD-1 antibody J43v2 m2a and by various activatable anti-PD-1 antibodies that include the anti-PD-1 antibody J43v2 m2a, the cleavable moiety referred to herein as 2001, and the masking moieties referred to herein as MP5-2 (SEQ ID NO: 565), MP7-1 (SEQ ID NO: 558), MP7-5 (SEQ ID NO: 562), MP8-2 (SEQ ID NO: 549) (upper panel); and MP7-1 (SEQ ID NO: 558), MP8-9 (SEQ ID NO: 556), MP8-8 (SEQ ID NO: 555) (lower panel).

[0473] FIG. 24 is a graph depicting that the anti-PD-1 J43v2 antibody induced diabetes in NOD mice with increased frequency as dosage increased and that anti-PD-1 J43v2 activatable antibodies exhibited reduced diabetes compared to antibodies at similar doses.

[0474] FIGS. 25A and 25B are a series of graphs depicting the binding to hPD-1 by the anti-PD-1 antibody A1.5 and by of various activatable antibodies of the disclosure comprising the anti-PD1 antibody A1.5, the masking moiety referred to herein as PD34 (SEQ ID NO: 99), and for FIG. 25A, the substrates referred to herein as 2006 (SEQ ID NO: 1095), 2007 (SEQ ID NO: 1096), 2008 (SEQ ID NO: 1097), 2009 (SEQ ID NO: 1098), and 2001 (SEQ ID NO: 214), and for FIG. 25B, the substrates referred to herein as 2001 (SEQ ID NO: 214), 2008 (SEQ ID NO: 1097), 2012 (SEQ ID NO: 1101), 2011 (SEQ ID NO: 1100), and 2003 (SEQ ID NO: 1092).

[0475] FIGS. 26A, 26B, and 26C are a series of graphs depicting the binding to hPD-1 by the anti-PD-1 antibody nivolumab (NV1) and by of various activatable antibodies of the disclosure comprising the anti-PD1 antibody NV1, the substrate referred to herein as 2001 (SEQ ID NO: 214), and the masking moieties referred to herein NV01 (SEQ ID NO: 1206), NV02 (SEQ ID NO: 1207), NV03 (SEQ ID NO: 1208), NV04 (SEQ ID NO: 1209), NV05 (SEQ ID NO: 1210), NV06 (SEQ ID NO: 1211), NV07 (SEQ ID NO: 1212), NV08 (SEQ ID NO: 1213), NV09 (SEQ ID NO: 1214), NV10 (SEQ ID NO: 1215), NV11 (SEQ ID NO: 1216), and NV12 (SEQ ID NO: 1217).

[0476] FIGS. 27A, 27B, and 27C are a series of graphs depicting the binding to hPD-1 by the anti-PD-1 antibody pembrolizumab (PM1) and by various activatable antibodies of the disclosure comprising the anti-PD1 antibody PM1, the substrate referred to herein as 2001 (SEQ ID NO: 214), and the masking moieties referred to herein PM01 (SEQ ID NO: 1351), PM02 (SEQ ID NO: 1352), PM03 (SEQ ID NO: 1353), PM04 (SEQ ID NO: 1354), PM05 (SEQ ID NO: 1355), PM06 (SEQ ID NO: 1356), PM07 (SEQ ID NO: 1357), PM08 (SEQ ID NO: 1358), PM09 (SEQ ID NO: 1359), PM10 (SEQ ID NO: 1360), PM11 (SEQ ID NO: 1361), and PM12 (SEQ ID NO: 1362).

[0477] FIG. 28 is a graph depicting the masking moiety specificity for various activatable antibodies of the disclosure that comprise the anti-PD-1 A1.5 (PD) antibody, the NV1 (NV) antibody, and the PM1 (PM) antibody and a variety of mask and substrate combinations.

[0478] FIGS. 29A and 29B are a series of graphs depicting the binding to PD1 by the IgG2a effector negative (EN) anti-PD1 antibody J43 (J43 m2a EN) and by various activatable antibodies of the disclosure comprising the IgG2a effector negative (EN) anti-PD1 antibody J43 (J43 m2a EN) and a variety of mask and substrate combinations.

[0479] FIG. 30 is a graph depicting that the anti-PD-1 J43m2a EN antibody induced diabetes in NOD mice with increased frequency as dosage increased and that anti-PD-1 J43m2a EN activatable antibodies exhibited reduced diabetes compared to antibodies at similar doses.

[0480] FIGS. 31A and 31B are a series of graphs depicting that anti-PD1 activatable antibodies of the disclosure MP7-1 2001 m2a EN and MP8-2 2001 m2a EN inhibit the growth of MC38 syngeneic tumors in a manner similar to positive control anti-PD1 antibody J43 m2a EN both as single agents (FIG. 31A) and in combination with the commercially available anti-CTLA4 antibody 9D9 mIgG2b (FIG. 31B).

[0481] FIGS. 32A, 32B, 32C, 32D, and 32E are a series of graphs depicting that the anti-human PD1 antibody referred to herein as A1.5 Ab (i.e., VH of SEQ ID NO: 21 and VL of SEQ ID NO: 47) blocks PD-L1/PD-L2 binding to PD1 and potently activates T cells in an antigen recall assay. FIG. 31A shows the binding of the anti-human PD-1 A1.5 Ab to immobilized human PD1 as detected by standard plate ELISA, and FIG. 31B shows the binding of A1.5 Ab to cynomolgus PD1 as detected by ELISA. FIG. 32C depicts the inhibition of biotinylated human PD-L1 to immobilized PD1 by A1.5 Ab as determined by ELISA, and FIG. 32D depicts the inhibition of biotinylated human PD-L2 to immobilized PD1 as determined by ELISA. FIG. 32E demonstrations that the A1.5 Ab enhances IFN-γ production in a CMV T cell restimulation assay.

[0482] FIGS. 33A and 33B are a series of graphs depicting that the activatable anti-PD1 antibody referred to herein as A1.5 PD34 2001 (i.e., VH of SEQ ID NO: 21, VL of SEQ ID NO: 47, masking moiety of SEQ ID NO: 99, and cleavable moiety of SEQ ID NO: 214) binds human PD1 with decreased affinity relative to the parental PD-1 Ab, i.e., A1.5 Ab (FIG. 33A), and the A1.5 PD34 2001 activatable antibody shows functional masking in a CMV T cell antigen recall assay (FIG. 33B).

[0483] FIG. 34 is a graph and a table depicting the results of pharmacokinetic (PK) analysis of plasma samples from cynomolgus monkeys after dosing with a single IV bolus dose of either the A1.5 antibody or the activatable antibody referred to herein as A1.5 PD34 2001 at 1 mg/kg or at 5 mg/kg. Mean PK parameters shown for both A1.5 and A1.5 PD34 2001.

[0484] FIG. 35 is a graph depicting that the combination of 10 mg/kg anti-PD-1 J43 antibody plus 10 mg/kg anti-CTLA-4 antibody dosed on days 0, 4 and 7 induced diabetes in 50% of NOD mice by day eleven while the same dosing schedule of activatable anti-PD-1 J43 antibodies with CTLA-4 antibody resulted in no induction of diabetes to day eighteen.

[0485] FIG. 36 is a graph depicting that the anti-PD1 activatable antibodies MP8-2 2012 m2a EN and MP8-2 2011 m2a EN inhibit the growth of MC38 syngeneic tumors similar to positive control anti-PD1 antibody J43 m2a EN, both as single agents and in combination with anti-CTLA4 antibody 9D9 mIgG2b.

[0486] FIG. 37 is a series of graphs depicting that combination CTLA4 antibody and J43 activatable antibody treatment protects mice against rechallenge with MC38 tumor cells.

[0487] FIG. 38 is a graph depicting that an anti-PD-1 antibody administered alone or in combination with an anti-CTLA4 antibody induced diabetes in NOD mice, whereas an anti-PD-1 activatable antibody as a single agent or in combination with an anti-CTLA4 antibody resulted in no induction of diabetes to day fifteen.

[0488] FIG. 39 is a graph demonstrating that anti-PD-1 activatable A1.5 and activatable nivolumab antibodies of the embodiments enhance IFN-gamma production in a CMV T cell restimulation assay as compared to a control antibody, but not to the extent effected by anti-PD-1 antibody A1.5 or nivolumab.

[0489] FIG. 40 is a graph demonstrating that an anti-PD-1 activatable pembrolizumab antibody of the embodiments enhances IFN-gamma production in a CMV T cell restimulation assay as compared to a control antibody, but not to the extent effected by anti-PD-1 antibody A1.5 or pembrolizumab.

### DETAILED DESCRIPTION OF THE INVENTION

[0490] The present invention provides monoclonal antibodies (mAbs), activatable antibodies, and antigen-binding fragments thereof that specifically bind programmed cell death protein 1 (PD-1), also known as CD279. The use of the term “PD-1” is intended to cover any variation thereof, such as, by way of non-limiting example, PD1 and/or PD 1, all variations are used herein interchangeably. Aberrant expression and/or activity of PD-1 and PD-1-related signaling has been implicated in the pathogenesis of many diseases and disorders, such as cancer.

[0491] PD-1, a cell surface receptor that belongs to the immunoglobulin superfamily, is expressed on T cells and pro-B cells. PD-1 is known to bind two ligands, PD-L1 and PD-L2. PD-1 is expressed on the surface of activated T cells, and the interaction between PD-1 and PD-L1 and/or PD-L2 functions as an immune checkpoint, as the binding of PD-L1 or PD-L2 to PD-1 inactivates the T cell. Thus, PD-1 plays a role in down-regulating the immune system by preventing the activation of T-cells, which, in turn, reduces autoimmunity and promotes self-tolerance.

[0492] The anti-PD-1 monoclonal antibodies and activated activatable anti-PD-1 antibodies of the disclosure bind and neutralize or otherwise inhibit the ability of PD-1 to bind or otherwise interact with PD-L1 and/or PD-L2. The anti-PD-1 monoclonal antibodies and activated activatable anti-PD-1 antibodies of the disclosure bind and neutralize or otherwise inhibit at least one biological activity of PD-1. For example, the anti-PD-1 monoclonal antibodies and activated activatable anti-PD-1 antibodies of the disclosure bind PD-1 and block or otherwise inhibit ligand activation of PD-1 on activated T cells. In contrast to traditional chemotherapies and other targeted anti-cancer therapies, which exert their effects by direct cytotoxic or tumor growth inhibition, the monoclonal antibodies and activatable antibodies of the disclosure block a negative regulator of T-cell activation and response, thereby allowing the immune system to attack the tumor.

[0493] The activatable anti-PD-1 antibodies of the disclosure include an antibody or antigen-binding fragment thereof that specifically binds PD-1 coupled to a masking moiety (MM), such that coupling of the MM reduces the ability of the antibody or antigen-binding fragment thereof to bind PD-1. The MM is coupled via a cleavable moiety (CM) that includes a sequence that functions as a substrate for a protease.

[0494] The activatable anti-PD-1 antibodies of the disclosure are activated when the cleavable moiety is cleaved by a protease. For example, the protease is produced by a tumor that is in proximity to T cells that express PD-1. In some embodiments, the protease is produced by a tumor that is co-localized with T cells that express PD-1. In the activated, i.e., cleaved state, the activatable anti-PD-1 antibodies of the disclosure bind PD-1 expressed on a T cell surface.

[0495] The activatable anti-PD-1 antibodies are used in methods of treating, preventing, delaying the progression of, ameliorating and/or alleviating a symptom of a disease or disorder associated with binding of a ligand selected from the group consisting of PD-L1 and PD-L2 to PD-1 on a T cell. Such ligands are often found on tumor cells and other immune cells. Binding of such ligands to PD-1 can lead to immune suppression, such as suppression of T cell activity, which is reduced by anti-PD1 antibodies and activatable anti-PD-1 antibodies of the disclosure. For example, the activatable anti-PD-1 antibodies are used in methods of treating, preventing, delaying the progression of, ameliorating and/or alleviating a symptom of a cancer or other neoplastic condition.

[0496] Exemplary activatable anti-PD-1 antibodies of the invention include, for example, activatable antibodies that include a heavy chain and a light chain that are, or are derived from, antibodies described in the Examples, for example in Examples 1, 2, 8, 9, 14, and 15.

[0497] In some embodiments, the activatable anti-PD-1 antibody includes a heavy chain that comprises or is derived from an amino acid sequence selected from the group consisting of SEQ ID NO: 1, 5, 9, 13, 17, 21, 23, 25, 27, 29, 31, 33, 35, and 37, and a light chain that comprises or is derived from an amino acid sequence selected from the group consisting of SEQ ID NO: 3, 7, 11, 15, 19, 39, 41, 43, 45, 47, 49, 51, 53, 55, 57, 59, 215, 217, 219, 221, 223, 225, 227, 229, 231, 233, 235, 237, 239, 241, 245, 247, 249, 251, 253, 255, 257, 259, 261, 263, 265, 267, 269, 271, 273, 275, 277, 279, 281, 283, 285, 287, 289, 291, 293, 515, 517, 519, 521, 523, 525, 527, 529, 531, 533, 535, 537, 539, 541, 572, 574, 576, 578, 580, 582, 919, 921, 923, 925, 927, 929, 931, 933, 935, 937, 939, 941, 943, 945, 947, 949, 951, 953, 955, 957, 959, 961, 963, 965, 967, 969, 971, 973, 975, 977, 979, 981, 983, 985, 987, 989, 991, 993, 995, 997, 999, 1001, 1003, 1005, 1007, 1009, 1011, 1013, 1015, 1017, 1019, 1021, 1023, 1025, 1027, 1030, 1032, 1034, 1036, 1039, 1041-1090, 1113-1120, 1123, 1124, 1127, 1128, 1131, 1132, 1134, 1135, 1138, 1139, 1143, 1144, 1147, 1148, 1151, 1152, 1155, 1156, 1159, 1160, 1163, 1164, 1167, 1168, 1170, 1171, 1174, 1175, 1178, 1179, 1182, 1183, 1186, 1187, 1190, 1191, 1194, 1195, 1198, 1199, 1202, 1203, 2055, 2054, 2057, 2056, 2059, and 2058.

[0498] In some embodiments, the activatable anti-PD-1 antibody includes a heavy chain that comprises or is derived from an amino acid sequence selected from the group consisting of SEQ ID NO: 21, 23, 25, 27, 29, 31, 33, 35, and 37, and a light chain that comprises or is derived from an amino acid sequence selected from the group consisting of SEQ ID NO: 39, 41, 43, 45, 47, 49, 51, 53, 55, 57, 59, 215, 217, 219, 221, 223, 225, 227, 229, 231, 233, 235, 237, 239, 241, 245, 247, 249, 251, 253, 255, 257, 259, 261, 263, 265, 267, 269, 271, 273, 275, 277, 279, 281, 283, 285, 287, 289, 291, 293, 515, 517, 519, 521, 523, 525, 527, 529, 531, 533, 535, 537, 539, 541, 572, 574, 576, 578, 580, 582, 584, 919, 921, 923, 925, 927, 929, 931, 933, 935, 937, 939, 941, 943, 945, 947, 949, 951, 953, 955, 957, 959, 961, 963, 965, 967, 969, 971, 973, 975, 977, 979, 981, 983, 985, 987, 989, 991, 993, 995, 997, 999, 1001, 1003, 1005, 1007, 1009, 1011, 1013, 1015, 1017, 1019, 1021, 1023, 1025, 1027, 1029, 1030, 1032, 1034, 1036, 1039, 1041-1090, 1113-1120, 1123, 1127, 1131, 1134, 1138, 1144, 1148, 1152, 1156, 1160, 1164, 1168, 1170, 1174, 1178, 1182, 1186, 1190, 1194, 1198, 1203, 2055, 2054, 2057, 2056, 2059, and 2058.

[0499] In some embodiments, the light chain comprises or is derived from an amino acid sequence selected from the group consisting of SEQ ID NO: 39, 41, 43, 45, 47, 49, 51, 53, 55, 57, and 59. In some embodiments, the light chain comprises or is derived from an amino acid sequence selected from the group consisting of SEQ ID NO: 215, 217, 219, 221, 223, 225, 227, 229, 231, 233, 235, 237, 239, 241, 245, 247, 249, 251, 253, 255, 257, 259, 261, 263, 265, 267, 269, 271, 273, 275, 277, 279, 281, 283, 285, 287, 289, 291, 293, 584, 919, 921, 923, 925, 927, 929, 931, 933, 935, 937, 939, 941, 943, 945, 947, 949, 951, 953, 955, 957, 959, 961, 963, 965, 967, 969, 971, 973, 975, 977, 979, 981, 983, 985, 987, 989, 991, 993, 995, and 997.

[0500] In some embodiments, the activatable anti-PD-1 antibody includes a heavy chain that comprises or is derived from an amino acid sequence selected from the group consisting of SEQ ID NO: 21, 23, 25, 27, 29, 31, 33, 35, and 37, and a light chain that comprises or is derived from an amino acid sequence selected from the group consisting of 215, 217, 219, 221, 223, 225, 227, 229, 231, 233, 235, 237, 239, 241, 243, 245, 247, 249, 251, 253, 255, 257, 259, 261, 263, 265, 267, 269, 271, 273, 275, 277, 279, 281, 283, 285, 287, 289, 291, 293, 572, 574, 576, 578, 580, 582, 1029, 1120, 1124, 1128, 1132, 1135, 1139, 1143, 1147, 1151, 1155, 1159, 1163, 1167, 1171, 1175, 1179, 1183, 1187, 1191, 1195, 1199, 1203, 2055, 2054, 2057, 2056, 2059, and 2058.

[0501] In some embodiments, the light chain comprises or is derived from an amino acid sequence selected from the group consisting of SEQ ID NO: 515, 517, 519, 521, 523, 525, 527, 529, 531, 533, 535, 537, 539, 541, 572, 574, 576, 578, 580, 582, 999, 1001, 1003, 1005, 1007, 1009, 1011, 1013, 1015, 1017, 1019, 1021, 1023, 1025, 1027, 1029, 1030, 1032, 1034, 1036, 1039, 1041-1090, 1113-1120, 1123, 1127, 1131, 1134, 1138, 1144, 1148, 1152, 1156, 1160, 1164, 1168, 1170, 1174, 1178, 1182, 1186, 1190, 1194, 1198, 1203, 2055, 2054, 2057, 2056, 2059, and 2058.

[0502] In some embodiments, the activatable anti-PD-1 antibody includes a light chain that comprises or is derived from an amino acid sequence selected from the group consisting of SEQ ID NOs: 215, 217, 219, 221, 223, 225, 227, 229, 231, 233, 235, 237, 239, 241, 243, 245, 247, 249, 251, 253, 255, 257, 259, 261, 263, 265, 267, 269, 271, 273, 275, 277, 279, 281, 283, 285, 287, 289, 291, 293, 515, 517, 519, 521, 523, 525, 527, 529, 531, 533, 535, 537, 539, 541, 572, 574, 576, 578, 580, 582, 919, 921, 923, 925, 927, 929, 931, 933, 935, 937, 939, 941, 943, 945, 947, 949, 951, 953, 955, 957, 959, 961, 963, 965, 967, 969, 971, 973, 975, 977, 979, 981, 983, 985, 987, 989, 991, 993, 995, 997, 1027, 1028, 1029, 1030, 1032, 1034, 1036, 1039, 1041-1076, 1113-1120, 1123, 1124, 1127, 1128, 1131, 1132, 1134, 1135, 1138, 1139, 1143, 1144, 1147, 1148, 1151, 1152, 1155, 1156, 1159, 1160, 1163, 1164, 1167, 1168, 1170, 1171, 1174, 1175, 1178, 1179, 1182, 1183, 1186, 1187, 1190, 1191, 1194, 1195, 1198, 1199, 1202, 12032055, 2054, 2057, 2056, 2059, and 2058.

[0503] In some embodiments, the activatable anti-PD-1 antibody includes a heavy chain that comprises or is derived from an amino acid sequence selected from the group consisting of SEQ ID NO: 21, 23, 25, 27, 29, 31, 33, 35, and 37, and a light chain that comprises or is derived from an amino acid sequence selected from the group consisting of SEQ ID NOs: 215, 217, 219, 221, 223, 225, 227, 229, 231, 233, 235, 237, 239, 241, 243, 245, 247, 249, 251, 253, 255, 257, 259, 261, 263, 265, 267, 269, 271, 273, 275, 277, 279, 281, 283, 285, 287, 289, 291, 293, 919, 921, 923, 925, 927, 929, 931, 933, 935, 937, 939, 941, 943, 945, 947, 949, 951, 953, 955, 957, 959, 961, 963, 965, 967, 969, 971, 973, 975, 977, 979, 981, 983, 985, 987, 989, 991, 993, 995, 997, 1028, 1029, 1041-1076, 1138, 1139, 1143, 1144, 1147, 1148, 1151, 1152, 1155, 1156, 1159, 1160, 1163, 1164, 1167, 1168, 1170, 1171, 1174, 1175, 1178, 1179, 1182, 1183, 1186, 1187, 1190, 1191, 1194, 1195, 1198, 1199, 1202, 1203, 2055, 2054, 2057, 2056, 2059, and 2058.

[0504] In some embodiments, the light chain comprises or is derived from an amino acid sequence selected from the group consisting of SEQ ID NOs: 919, 921, 923, 925, 927, 929, 931, 933, 935, 937, 939, 941, 943, 945, 947, 949, 951, 953, 955, 957, 959, 961, 963, 965, 967, 969, 971, 973, 975, 977, 979, 981, 983, 985, 987, 989, 991, 993, 995, 997, 1028, 1041-1076, 1138, 1144, 1148, 1152, 1156, 1160, 1164, 1168, 1170, 1174, 1178, 1182, 1186, 1190, 1194, 1198, 1202, 2055, 2057, and 2059.

[0505] In some embodiments, the light chain comprises or is derived from an amino acid sequence selected from the group consisting of SEQ ID NOs: 215, 217, 219, 221, 223, 225, 227, 229, 231, 233, 235, 237, 239, 241, 243, 245, 247, 249, 251, 253, 255, 257, 259, 261, 263, 265, 267, 269, 271, 273, 275, 277, 279, 281, 283, 285, 287, 289, 291, 293, 1029, 1139, 1143, 1147, 1151, 1155, 1159, 1163, 1167, 1171, 1175, 1179, 1183, 1187, 1191, 1195, 1199, 1203, 2054, 2056, and 2058.

[0506] In some embodiments, the activatable anti-PD-1 antibody includes a heavy chain that comprises or is derived from an amino acid sequence selected from the group consisting of SEQ ID NO: 546 and a light chain that comprises or is derived from an amino acid sequence selected from the group consisting of SEQ ID NOs: 515, 517, 519, 521, 523, 525, 527, 529, 531, 533, 535, 537, 539, 541, 572, 574, 576, 578, 580, 582, 999, 1001, 1003, 1005, 1007, 1009, 1011, 1013, 1015, 1017, 1019, 1021, 1023, 1025, 1027, 1030, 1032, 1034, 1036, 1039, 1077-1090, 1113-1120, 1123, 1124, 1127, 1128, 1131, 1132, 1134, and 1135.

[0507] In some embodiments, the activatable anti-PD-1 antibody includes a light chain that comprises or is derived from an amino acid sequence selected from the group consisting of SEQ ID NOS: 999, 1001, 1003, 1005, 1007, 1009, 1011, 1013, 1015, 1017, 1019, 1021, 1023, 1025, 1027, 1030, 1032, 1034, 1036, 1039, 1070-1090, 1119, 1123, 1127, 1131, and 1134.

[0508] In some embodiments, the activatable anti-PD-1 antibody includes a light chain that comprises or is derived from an amino acid sequence selected from the group consisting of SEQ ID NOS: 515, 517, 519, 521, 523, 525, 527, 529, 531, 533, 535, 537, 539, 541, 572, 574, 576, 578, 580, 582, 1120, 1124, 1128, 1132, and 1135.

[0509] In some embodiments, the activatable anti-PD-1 antibody includes a heavy chain that comprises or is derived from a heavy chain amino acid sequence shown in Table 7. In some embodiments, the activatable anti-PD-1 antibody includes a light chain that comprises or is derived from a light chain amino acid sequence shown in Table 7. In some embodiments, the activatable anti-PD-1 antibody includes a heavy chain that comprises or is derived from a heavy chain amino acid sequence shown in Table 7, and a light chain that comprises or is derived from a light chain amino acid sequence shown in Table 7. In some embodiments, the activatable anti-PD-1 antibody includes a combination of a heavy chain variable region sequence and a light chain variable region sequence from the combinations shown in Group A in Table 7. In some embodiments, the activatable anti-PD-1 antibody includes a combination of a heavy chain variable region sequence and a light chain variable region sequence from the combinations shown in Group B in Table 7. In some embodiments, the activatable anti-PD-1 antibody includes a combination of a heavy chain variable region sequence and a light chain variable region sequence from the combinations shown in Group C in Table 7. In some embodiments, the activatable anti-PD-1 antibody includes a combination of a heavy chain variable region sequence and a light chain variable region sequence from the combinations shown in Group D in Table 7. In some embodiments, the activatable anti-PD-1 antibody includes a combination of a heavy chain variable region sequence and a light chain variable region sequence from the combinations shown in Group E in Table 7. In some embodiments, the activatable anti-PD-1 antibody includes a combination of a heavy chain variable region sequence and a light chain variable region sequence from the combinations shown in Group F in Table 7. In some embodiments, the activatable anti-PD-1 antibody includes a combination of a heavy chain variable region sequence and a light chain variable region sequence from the combinations shown in Group H in Table 7. In some embodiments, the activatable anti-PD-1 antibody includes a combination of a heavy chain variable region sequence and a light chain variable region sequence from the combinations shown in Group I in Table 7. In some embodiments, the activatable anti-PD-1 antibody includes a combination of a heavy chain variable region sequence and a light chain variable region sequence from the combinations shown in Group J in Table 7. In some embodiments, the activatable anti-PD-1 antibody includes a combination of a heavy chain variable region sequence and a light chain variable region sequence from the combinations shown in Group K in Table 7. In some embodiments, the activatable anti-PD-1 antibody includes a combination of a heavy chain variable region sequence and a light chain variable region sequence from the combinations shown in Group L in Table 7. In some embodiments, the activatable anti-PD-1 antibody includes a combination of a heavy chain variable region sequence and a light chain variable region sequence from the combinations shown in Group M in Table 7. In some embodiments, the activatable anti-PD-1 antibody includes a combination of the heavy chain variable region sequence and the light chain variable region sequence as shown in Group N in Table 7. In some embodiments, the activatable anti-PD-1 antibody includes a combination of the heavy chain variable region sequence and the light chain variable region sequence as shown in Group O in Table 7. In some embodiments, the activatable anti-PD-1 antibody includes a combination of a heavy chain variable region sequence and a light chain variable region sequence from the combinations shown in Group P in Table 7. In some embodiments, the activatable anti-PD-1 antibody includes a combination of a heavy chain variable region sequence and a light chain variable region sequence from the combinations shown in Group Q in Table 7.

[0510] In some embodiments, the activatable anti-PD-1 antibody includes a combination of the complementarity determining region (CDR) sequences of a heavy chain sequence from the heavy chain sequences shown in Group A in Table 7. In some embodiments, the activatable anti-PD-1 antibody includes a combination of the CDRs of a light chain sequence from the light chain sequences shown in Group A in Table 7. In some embodiments, the activatable anti-PD-1 antibody includes a combination of the CDRs of a heavy chain sequence from the heavy chain sequences shown in Group A in Table 7 and the CDRs of a light chain sequence from the heavy chain sequences shown in Group A in Table 7.

[0511] In some embodiments, the activatable anti-PD-1 antibody includes a combination of CDRs of a heavy chain sequence from the heavy chain sequences shown in Group B in Table 7. In some embodiments, the activatable anti-PD-1 antibody includes a combination of the CDRs of a light chain sequence from the light chain sequences shown in Group B in Table 7. In some embodiments, the activatable anti-PD-1 antibody includes a combination of the CDRs of a heavy chain sequence from the heavy chain sequences shown in Group B in Table 7 and the CDRs of a light chain sequence from the heavy chain sequences shown in Group B in Table 7.

[0512] In some embodiments, the activatable anti-PD-1 antibody includes a combination of the CDRs of a heavy chain sequence from the heavy chain sequences shown in Group C in Table 7. In some embodiments, the activatable anti-PD-1 antibody includes a combination of the CDRs of a light chain sequence from the light chain sequences shown in Group C in Table 7. In some embodiments, the activatable anti-PD-1 antibody includes a combination of the CDRs of a heavy chain sequence from the heavy chain sequences shown in Group C in Table 7 and the CDRs of a light chain sequence from the heavy chain sequences shown in Group C in Table 7.

[0513] In some embodiments, the activatable anti-PD-1 antibody includes a combination of the CDRs of a heavy chain sequence from the heavy chain sequences shown in Group D in Table 7. In some embodiments, the activatable anti-PD-1 antibody includes a combination of the CDRs of a light chain sequence from the light chain sequences shown in Group D in Table 7. In some embodiments, the activatable anti-PD-1 antibody includes a combination of the CDRs of a heavy chain sequence from the heavy chain sequences shown in Group D in Table 7 and the CDRs of a light chain sequence from the heavy chain sequences shown in Group D in Table 7.

[0514] In some embodiments, the activatable anti-PD-1 antibody includes a combination of the CDRs of a heavy chain sequence from the heavy chain sequences shown in Group E in Table 7. In some embodiments, the activatable anti-PD-1 antibody includes a combination of the CDRs of a light chain sequence from the light chain sequences shown in Group E in Table 7. In some embodiments, the activatable anti-PD-1 antibody includes a combination of the CDRs of a heavy chain sequence from the heavy chain sequences shown in Group E in Table 7 and the CDRs of a light chain sequence from the heavy chain sequences shown in Group E in Table 7.

[0515] In some embodiments, the activatable anti-PD-1 antibody includes a combination of the CDRs of a heavy chain sequence from the heavy chain sequences shown in Group F in Table 7. In some embodiments, the activatable anti-PD-1 antibody includes a combination of the CDRs of a light chain sequence from the light chain sequences shown in Group F in Table 7. In some embodiments, the activatable anti-PD-1 antibody includes a combination of the CDRs of a heavy chain sequence from the heavy chain sequences shown in Group F in Table 7 and the CDRs of a light chain sequence from the heavy chain sequences shown in Group F in Table 7.

[0516] In some embodiments, the activatable anti-PD-1 antibody includes a combination of the CDRs of a heavy chain sequence from the heavy chain sequences shown in Group G in Table 7. In some embodiments, the activatable anti-PD-1 antibody includes a combination of the CDRs of a light chain sequence from the light chain sequences shown in Group G in Table 7. In some embodiments, the activatable anti-PD-1 antibody includes a combination of the CDRs of a heavy chain sequence from the heavy chain sequences shown in Group G in Table 7 and the CDRs of a light chain sequence from the heavy chain sequences shown in Group G in Table 7.

[0517] In some embodiments, the activatable anti-PD-1 antibody includes a combination of the CDRs of a heavy chain sequence from the heavy chain sequences shown in Group H in Table 7. In some embodiments, the activatable anti-PD-1 antibody includes a combination of the CDRs of a light chain sequence from the light chain sequences shown in Group H in Table 7. In some embodiments, the activatable anti-PD-1 antibody includes a combination of the CDRs of a heavy chain sequence from the heavy chain sequences shown in Group H in Table 7 and the CDRs of a light chain sequence from the heavy chain sequences shown in Group H in Table 7.

[0518] In some embodiments, the activatable anti-PD-1 antibody includes a combination of the CDRs of a heavy chain sequence from the heavy chain sequences shown in Group I in Table 7. In some embodiments, the activatable anti-PD-1 antibody includes a combination of the CDRs of a light chain sequence from the light chain sequences shown in Group I in Table 7. In some embodiments, the activatable anti-PD-1 antibody includes a combination of the CDRs of a heavy chain sequence from the heavy chain sequences shown in Group I in Table 7 and the CDRs of a light chain sequence from the heavy chain sequences shown in Group I in Table 7.

[0519] In some embodiments, the activatable anti-PD-1 antibody includes a combination of the CDRs of a heavy chain sequence from the heavy chain sequences shown in Group J in Table 7. In some embodiments, the activatable anti-PD-1 antibody includes a combination of the CDRs of a light chain sequence from the light chain sequences shown in Group J in Table 7. In some embodiments, the activatable anti-PD-1 antibody includes a combination of the CDRs of a heavy chain sequence from the heavy chain sequences shown in Group J in Table 7 and the CDRs of a light chain sequence from the heavy chain sequences shown in Group J in Table 7.

[0520] In some embodiments, the activatable anti-PD-1 antibody includes a combination of the CDRs of a heavy chain sequence from the heavy chain sequences shown in Group K in Table 7. In some embodiments, the activatable anti-PD-1 antibody includes a combination of the CDRs of a light chain sequence from the light chain sequences shown in Group K in Table 7. In some embodiments, the activatable anti-PD-1 antibody includes a combination of the CDRs of a heavy chain sequence from the heavy chain sequences shown in Group K in Table 7 and the CDRs of a light chain sequence from the heavy chain sequences shown in Group K in Table 7.

[0521] In some embodiments, the activatable anti-PD-1 antibody includes a combination of the CDRs of a heavy chain sequence from the heavy chain sequences shown in Group L in Table 7. In some embodiments, the activatable anti-PD-1 antibody includes a combination of the CDRs of a light chain sequence from the light chain sequences shown in Group L in Table 7. In some embodiments, the activatable anti-PD-1 antibody includes a combination of the CDRs of a heavy chain sequence from the heavy chain sequences shown in Group L in Table 7 and the CDRs of a light chain sequence from the heavy chain sequences shown in Group L in Table 7.

[0522] In some embodiments, the activatable anti-PD-1 antibody includes a combination of the CDRs of a heavy chain sequence from the heavy chain sequences shown in Group M in Table 7. In some embodiments, the activatable anti-PD-1 antibody includes a combination of the CDRs of a light chain sequence from the light chain sequences shown in Group M in Table 7. In some embodiments, the activatable anti-PD-1 antibody includes a combination of the CDRs of a heavy chain sequence from the heavy chain sequences shown in Group M in Table 7 and the CDRs of a light chain sequence from the heavy chain sequences shown in Group M in Table 7.

[0523] In some embodiments, the activatable anti-PD-1 antibody includes a combination of the CDRs of a heavy chain sequence from the heavy chain sequences shown in Group N in Table 7. In some embodiments, the activatable anti-PD-1 antibody includes a combination of the CDRs of a light chain sequence from the light chain sequences shown in Group N in Table 7. In some embodiments, the activatable anti-PD-1 antibody includes a combination of the CDRs of a heavy chain sequence from the heavy chain sequences shown in Group N in Table 7 and the CDRs of a light chain sequence from the heavy chain sequences shown in Group N in Table 7.

[0524] In some embodiments, the activatable anti-PD-1 antibody includes a combination of the CDRs of a heavy chain sequence from the heavy chain sequences shown in Group O in Table 7. In some embodiments, the activatable anti-PD-1 antibody includes a combination of the CDRs of a light chain sequence from the light chain sequences shown in Group O in Table 7. In some embodiments, the activatable anti-PD-1 antibody includes a combination of the CDRs of a heavy chain sequence from the heavy chain sequences shown in Group O in Table 7 and the CDRs of a light chain sequence from the heavy chain sequences shown in Group O in Table 7.

[0525] In some embodiments, the activatable anti-PD-1 antibody includes a combination of the CDRs of a heavy chain sequence from the heavy chain sequences shown in Group P in Table 7. In some embodiments, the activatable anti-PD-1 antibody includes a combination of the CDRs of a light chain sequence from the light chain sequences shown in Group P in Table 7. In some embodiments, the activatable anti-PD-1 antibody includes a combination of the CDRs of a heavy chain sequence from the heavy chain sequences shown in Group P in Table 7 and the CDRs of a light chain sequence from the heavy chain sequences shown in Group P in Table 7.

[0526] In some embodiments, the activatable anti-PD-1 antibody includes a combination of the CDRs of a heavy chain sequence from the heavy chain sequences shown in Group Q in Table 7. In some embodiments, the activatable anti-PD-1 antibody includes a combination of the CDRs of a light chain sequence from the light chain sequences shown in Group Q in Table 7. In some embodiments, the activatable anti-PD-1 antibody includes a combination of the CDRs of a heavy chain sequence from the heavy chain sequences shown in Group Q in Table 7 and the CDRs of a light chain sequence from the heavy chain sequences shown in Group Q in Table 7.

[0527] In some embodiments, the activatable anti-PD-1 antibody includes a combination of the CDRs of a heavy chain sequence from the heavy chain sequences shown in Group R in Table 7. In some embodiments, the activatable anti-PD-1 antibody includes a combination of the CDRs of a light chain sequence from the light chain sequences shown in Group R in Table 7. In some embodiments, the activatable anti-PD-1 antibody includes a combination of the CDRs of a heavy chain sequence from the heavy chain sequences shown in Group R in Table 7 and the CDRs of a light chain sequence from the heavy chain sequences shown in Group R in Table 7.

[0528] In some embodiments, the activatable anti-PD-1 antibody includes a combination of the CDRs of a heavy chain sequence from the heavy chain sequences shown in Group S in Table 7. In some embodiments, the activatable anti-PD-1 antibody includes a combination of the CDRs of a light chain sequence from the light chain sequences shown in Group S in Table 7. In some embodiments, the activatable anti-PD-1 antibody includes a combination of the CDRs of a heavy chain sequence from the heavy chain sequences shown in Group S in Table 7 and the CDRs of a light chain sequence from the heavy chain sequences shown in Group S in Table 7.

[0529] In some embodiments, the activatable anti-PD-1 antibody includes a combination of the CDRs of a heavy chain sequence from the heavy chain sequences shown in Group T in Table 7. In some embodiments, the activatable anti-PD-1 antibody includes a combination of the CDRs of a light chain sequence from the light chain sequences shown in Group T in Table 7. In some embodiments, the activatable anti-PD-1 antibody includes a combination of the CDRs of a heavy chain sequence from the heavy chain sequences shown in Group T in Table 7 and the CDRs of a light chain sequence from the heavy chain sequences shown in Group T in Table 7.

[0530] In some embodiments, the activatable anti-PD-1 antibody includes a combination of the CDRs of a heavy chain sequence from the heavy chain sequences shown in Group U in Table 7. In some embodiments, the activatable anti-PD-1 antibody includes a combination of the CDRs of a light chain sequence from the light chain sequences shown in Group U in Table 7. In some embodiments, the activatable anti-PD-1 antibody includes a combination of the CDRs of a heavy chain sequence from the heavy chain sequences shown in Group U in Table 7 and the CDRs of a light chain sequence from the heavy chain sequences shown in Group U in Table 7.

[0531] In some embodiments, the activatable anti-PD-1 antibody includes a combination of the CDRs of a heavy chain sequence from the heavy chain sequences shown in Group V in Table 7. In some embodiments, the activatable anti-PD-1 antibody includes a combination of the CDRs of a light chain sequence from the light chain sequences shown in Group V in Table 7. In some embodiments, the activatable anti-PD-1 antibody includes a combination of the CDRs of a heavy chain sequence from the heavy chain sequences shown in Group V in Table 7 and the CDRs of a light chain sequence from the heavy chain sequences shown in Group V in Table 7.

[0532] In some embodiments, the activatable anti-PD-1 antibody includes a combination of the CDRs of the heavy chain sequence of SEQ ID NO: 619 and a combination of the CDRs of the light chain sequence of SEQ ID NO: 1856 as shown in Group V in Table 7. In some embodiments, the activatable anti-PD-1 antibody includes a combination of the heavy chain sequence of SEQ ID NO: 619 and the light chain sequence of SEQ ID NO: 1856 as shown in Group V in Table 7.

[0533] In some embodiments, the activatable anti-PD-1 antibody includes a combination of the CDRs of the heavy chain sequence of SEQ ID NO: 1846 and a combination of the CDRs of the light chain sequence of SEQ ID NO: 1858 as shown in Group V in Table 7. In some embodiments, the activatable anti-PD-1 antibody includes a combination of the heavy chain sequence of SEQ ID NO: 1846 and the light chain sequence of SEQ ID NO: 1858 as shown in Group V in Table 7.

[0534] In some embodiments, the activatable anti-PD-1 antibody includes a combination of the CDRs of the heavy chain sequence of SEQ ID NO: 1843 and a combination of the CDRs of the light chain sequence of SEQ ID NO: 1859 as shown in Group V in Table 7. In some embodiments, the activatable anti-PD-1 antibody includes a combination of the heavy chain sequence of SEQ ID NO: 1843 and the light chain sequence of SEQ ID NO: 1859 as shown in Group V in Table 7.

[0535] In some embodiments, the activatable anti-PD-1 antibody includes a combination of the CDRs of the heavy chain sequence of SEQ ID NO: 1847 and a combination of the CDRs of the light chain sequence of SEQ ID NO: 737 as shown in Group V in Table 7. In some embodiments, the activatable anti-PD-1 antibody includes a combination of the heavy chain sequence of SEQ ID NO: 1847 and the light chain sequence of SEQ ID NO: 737 as shown in Group V in Table 7.

[0536] In some embodiments, the activatable anti-PD-1 antibody includes a combination of the CDRs of the heavy chain sequence of SEQ ID NO: 1848 and a combination of the CDRs of the light chain sequence of SEQ ID NO: 1860 as shown in Group V in Table 7. In some embodiments, the activatable anti-PD-1 antibody includes a combination of the heavy chain sequence of SEQ ID NO: 1848 and the light chain sequence of SEQ ID NO: 1860 as shown in Group V in Table 7.

[0537] In some embodiments, the activatable anti-PD-1 antibody includes a combination of the CDRs of the heavy chain sequence of SEQ ID NO: 1844 and a combination of the CDRs of the light chain sequence of SEQ ID NO: 1861 as shown in Group V in Table 7. In some embodiments, the activatable anti-PD-1 antibody includes a combination of the heavy chain sequence of SEQ ID NO: 1844 and the light chain sequence of SEQ ID NO: 1861 as shown in Group V in Table 7.

[0538] In some embodiments, the activatable anti-PD-1 antibody includes a combination of the CDRs of the heavy chain sequence of SEQ ID NO: 1841 and a combination of the CDRs of the light chain sequence of SEQ ID NO: 737 as shown in Group V in Table 7. In some embodiments, the activatable anti-PD-1 antibody includes a combination of the heavy chain sequence of SEQ ID NO: 1841 and the light chain sequence of SEQ ID NO: 737 as shown in Group V in Table 7.

[0539] In some embodiments, the activatable anti-PD-1 antibody includes a combination of the CDRs of the heavy chain sequence of SEQ ID NO: 1842 and a combination of the CDRs of the light chain sequence of SEQ ID NO: 737 as shown in Group V in Table 7. In some embodiments, the activatable anti-PD-1 antibody includes a combination of the heavy chain sequence of SEQ ID NO: 1842 and the light chain sequence of SEQ ID NO: 737 as shown in Group V in Table 7.

[0540] In some embodiments, the activatable anti-PD-1 antibody includes a combination of the CDRs of the heavy chain sequence of SEQ ID NO: 1845 and a combination of the CDRs of the light chain sequence of SEQ ID NO: 737 as shown in Group V in Table 7. In some embodiments, the activatable anti-PD-1 antibody includes a combination of the heavy chain sequence of SEQ ID NO: 1845 and the light chain sequence of SEQ ID NO: 737 as shown in Group V in Table 7.

[0541] In some embodiments, the activatable anti-PD-1 antibody includes a combination of the CDRs of the heavy chain sequence of SEQ ID NO: 1835 and a combination of the CDRs of the light chain sequence of SEQ ID NO: 1857 as shown in Group V in Table 7. In some embodiments, the activatable anti-PD-1 antibody includes a combination of the heavy chain sequence of SEQ ID NO: 1835 and the light chain sequence of SEQ ID NO: 1857 as shown in Group V in Table 7.

[0542] In some embodiments, the activatable anti-PD-1 antibody includes a combination of the CDRs of the heavy chain sequence of SEQ ID NO: 1836 and a combination of the CDRs of the light chain sequence of SEQ ID NO: 1862 as shown in Group V in Table 7. In some embodiments, the activatable anti-PD-1 antibody includes a combination of the heavy chain sequence of SEQ ID NO: 1836 and the light chain sequence of SEQ ID NO: 1862 as shown in Group V in Table 7.

[0543] In some embodiments, the activatable anti-PD-1 antibody includes a combination of the CDRs of the heavy chain sequence of SEQ ID NO: 1837 and a combination of the CDRs of the light chain sequence of SEQ ID NO: 1863 as shown in Group V in Table 7. In some embodiments, the activatable anti-PD-1 antibody includes a combination of the heavy chain sequence of SEQ ID NO: 1837 and the light chain sequence of SEQ ID NO: 1863 as shown in Group V in Table 7.

[0544] In some embodiments, the activatable anti-PD-1 antibody includes a combination of the CDRs of the heavy chain sequence of SEQ ID NO: 1838 and a combination of the CDRs of the light chain sequence of SEQ ID NO: 1864 as shown in Group V in Table 7. In some embodiments, the activatable anti-PD-1 antibody includes a combination of the heavy chain sequence of SEQ ID NO: 1838 and the light chain sequence of SEQ ID NO: 1864 as shown in Group V in Table 7.

[0545] In some embodiments, the activatable anti-PD-1 antibody includes a combination of the CDRs of the heavy chain sequence of SEQ ID NO: 1838 and a combination of the CDRs of the light chain sequence of SEQ ID NO: 1865 as shown in Group V in Table 7. In some embodiments, the activatable anti-PD-1 antibody includes a combination of the heavy chain sequence of SEQ ID NO: 1838 and the light chain sequence of SEQ ID NO: 1865 as shown in Group V in Table 7.

[0546] In some embodiments, the activatable anti-PD-1 antibody includes a combination of the CDRs of the heavy chain sequence of SEQ ID NO: 1839 and a combination of the CDRs of the light chain sequence of SEQ ID NO: 1864 as shown in Group V in Table 7. In some embodiments, the activatable anti-PD-1 antibody includes a combination of the heavy chain sequence of SEQ ID NO: 1839 and the light chain sequence of SEQ ID NO: 1864 as shown in Group V in Table 7.

[0547] In some embodiments, the activatable anti-PD-1 antibody includes a combination of the CDRs of the heavy chain sequence of SEQ ID NO: 1839 and a combination of the CDRs of the light chain sequence of SEQ ID NO: 1865 as shown in Group V in Table 7. In some embodiments, the activatable anti-PD-1 antibody includes a combination of the heavy chain sequence of SEQ ID NO: 1839 and the light chain sequence of SEQ ID NO: 1865 as shown in Group V in Table 7.

[0548] In some embodiments, the activatable anti-PD-1 antibody includes a combination of the CDRs of the heavy chain sequence of SEQ ID NO: 1840 and a combination of the CDRs of the light chain sequence of SEQ ID NO: 1866 as shown in Group V in Table 7. In some embodiments, the activatable anti-PD-1 antibody includes a combination of the heavy chain sequence of SEQ ID NO: 1840 and the light chain sequence of SEQ ID NO: 1866 as shown in Group V in Table 7.

[0549] In some embodiments, the activatable anti-PD-1 antibody includes a combination of the CDRs of the heavy chain sequence of SEQ ID NO: 1841 and a combination of the CDRs of the light chain sequence of SEQ ID NO: 1867 as shown in Group V in Table 7. In some embodiments, the activatable anti-PD-1 antibody includes a combination of the heavy chain sequence of SEQ ID NO: 1841 and the light chain sequence of SEQ ID NO: 1867 as shown in Group V in Table 7.

[0550] In some embodiments, the activatable anti-PD-1 antibody includes a combination of the CDRs of the heavy chain sequence of SEQ ID NO: 1841 and a combination of the CDRs of the light chain sequence of SEQ ID NO: 1868 as shown in Group V in Table 7. In some embodiments, the activatable anti-PD-1 antibody includes a combination of the heavy chain sequence of SEQ ID NO: 1841 and the light chain sequence of SEQ ID NO: 1868 as shown in Group V in Table 7.

[0551] In some embodiments, the activatable anti-PD-1 antibody includes a combination of the CDRs of the heavy chain sequence of SEQ ID NO: 1849 and a combination of the CDRs of the light chain sequence of SEQ ID NO: 1858 as shown in Group V in Table 7. In some embodiments, the activatable anti-PD-1 antibody includes a combination of the heavy chain sequence of SEQ ID NO: 1849 and the light chain sequence of SEQ ID NO: 1858 as shown in Group V in Table 7.

[0552] In some embodiments, the activatable anti-PD-1 antibody includes a combination of the CDRs of the heavy chain sequence of SEQ ID NO: 1853 and a combination of the CDRs of the light chain sequence of SEQ ID NO: 1859 as shown in Group V in Table 7. In some embodiments, the activatable anti-PD-1 antibody includes a combination of the heavy chain sequence of SEQ ID NO: 1853 and the light chain sequence of SEQ ID NO: 1859 as shown in Group V in Table 7.

[0553] In some embodiments, the activatable anti-PD-1 antibody includes a combination of the CDRs of the heavy chain sequence of SEQ ID NO: 1869 and a combination of the CDRs of the light chain sequence of SEQ ID NO: 737 as shown in Group V in Table 7. In some embodiments, the activatable anti-PD-1 antibody includes a combination of the heavy chain sequence of SEQ ID NO: 1869 and the light chain sequence of SEQ ID NO: 737 as shown in Group V in Table 7.

[0554] In some embodiments, the activatable anti-PD-1 antibody includes a combination of the CDRs of the heavy chain sequence of SEQ ID NO: 1850 and a combination of the CDRs of the light chain sequence of SEQ ID NO: 1860 as shown in Group V in Table 7. In some embodiments, the activatable anti-PD-1 antibody includes a combination of the heavy chain sequence of SEQ ID NO: 1850 and the light chain sequence of SEQ ID NO: 1860 as shown in Group V in Table 7.

[0555] n some embodiments, the activatable anti-PD-1 antibody includes a combination of the CDRs of the heavy chain sequence of SEQ ID NO: 1851 and a combination of the CDRs of the light chain sequence of SEQ ID NO: 1861 as shown in Group V in Table 7. In some embodiments, the activatable anti-PD-1 antibody includes a combination of the heavy chain sequence of SEQ ID NO: 1851 and the light chain sequence of SEQ ID NO: 1861 as shown in Group V in Table 7.

[0556] In some embodiments, the activatable anti-PD-1 antibody includes a combination of the CDRs of the heavy chain sequence of SEQ ID NO: 1852 and a combination of the CDRs of the light chain sequence of SEQ ID NO: 737 as shown in Group V in Table 7. In some embodiments, the activatable anti-PD-1 antibody includes a combination of the heavy chain sequence of SEQ ID NO: 1852 and the light chain sequence of SEQ ID NO: 737 as shown in Group V in Table 7.

[0557] In some embodiments, the activatable anti-PD-1 antibody includes a combination of the CDRs of the heavy chain sequence of SEQ ID NO: 1854 and a combination of the CDRs of the light chain sequence of SEQ ID NO: 737 as shown in Group V in Table 7. In some embodiments, the activatable anti-PD-1 antibody includes a combination of the heavy chain sequence of SEQ ID NO: 1854 and the light chain sequence of SEQ ID NO: 737 as shown in Group V in Table 7.

[0558] In some embodiments, the activatable anti-PD-1 antibody includes a combination of the CDRs of the heavy chain sequence of SEQ ID NO: 1855 and a combination of the CDRs of the light chain sequence of SEQ ID NO: 737 as shown in Group V in Table 7. In some embodiments, the activatable anti-PD-1 antibody includes a combination of the heavy chain sequence of SEQ ID NO: 1855 and the light chain sequence of SEQ ID NO: 737 as shown in Group V in Table 7.

[0559] In some embodiments, the activatable anti-PD-1 antibody includes a combination of the CDRs of a heavy chain sequence from the heavy chain sequences shown in Group W in Table 7. In some embodiments, the activatable anti-PD-1 antibody includes a combination of the CDRs of a light chain sequence from the light chain sequences shown in Group W in Table 7. In some embodiments, the activatable anti-PD-1 antibody includes a combination of the CDRs of a heavy chain sequence from the heavy chain sequences shown in Group W in Table 7 and the CDRs of a light chain sequence from the heavy chain sequences shown in Group W in Table 7.

TABLE 7
Variable Heavy Chain Region (VH) and Variable Light Chain Region
(VL) Sequences for Activatable Antibodies that Bind PD-1
Group A

| | |
|---|---|
| VH | QVQLVESGGDVVQPGGSLRLSCAASGVAFSNYGMHWVRQAPGKGLEWVAVIWYDGSNKYYADSVKGRFTISR |
| | DNSKNMLYLQMNSLRAEDTAMYYCARNDDYWGQGTLVTVSS (SEQ ID NO: 615) |
| VH | QVQLVESGGDVVQPGRSLRLSCAASGLTFTNYGFHWVRQAPGKGLEWVAVIWYDGSKKYYADSVKGRFTISR |
| | DNSKNTLYLQMNNLRAEDTAVYYCATGDDYWGQGTLVTVSS (SEQ ID NO: 617) |
| VH | QVYLVESGGGVVQPGRSLRLSCAASGFTFSNYGMHWVRQAPGKGLEWVALIWYDGSNKYYADSVKGRFTISR |
| | DNSKNTLYLQMTSLRVEDTAVYYCASNVDHWGQGTLVTVSS (SEQ ID NO: 618) |
| VH | QVQLVESGGGVVQPGRSLRLDCKASGITFSNSGMHWVRQAPGKGLEWVAVIWYDGSKRYYADSVKGRFTISR |
| | DNSKNTLFLQMNSLRAEDTAVYYCATNDDYWGQGTLVTVSS (SEQ ID NO: 1346) |
| VH | QLQLQESGPGLVKPSETLSLTCTVSGGSLSRSSFFWGWIRQPPGKGLEWIGSIYYSGSTYYNPSLKSRVTIS |
| | VDTSKNQFSLKLSSVTAADTAVYYCVRDYDILTGDEDYWGQGTLVTVSS (SEQ ID NO: 620) |
| VH | QVQLVESGGGVVQPGRSLRLSCTTSGITFSSYGFHWVRQAPGKGLEWVAVIWYDGSKKYYADSVKGRFTLSR |
| | DDSKNTLYLQMNSLRAEDTAVYYCVTGDDYWGQGTLVTVSS (SEQ ID NO: 621) |
| VH | QLQLQESGPGLVKPSETLSLTCSVSGGSLSRSSYFWGWIRQPPGKGLEWIASIFYSGETYFNPSLKSRVTIS |
| | VDTSRNQFSLKLSSVTAADTAVYYCARDYDILTGDEDYWGQGTLVTVSS (SEQ ID NO: 623) |
| VL | EIVLTQSPATLSLSPGERATLSCRASQSVSSYLAWYQQKPGQAPRLIIYDASNRATGIPARFSGSGSGTDFT |
| | LTISSLEPEDFAVYYCQQRSNWPLTFGGGTKVEIK (SEQ ID NO: 624) |
| VL | EIVLTQSPATLSLSPGERATLSCRASQSVSSYLAWYQQKPGQAPRLLIYDTSNRATGIPARFSGSGSGTDFT |
| | LTISSLEPEDFAVYYCQQRSNWPLTFGGGTKVEIK (SEQ ID NO: 625) |
| VL | EIVLTQSPATLSLSPGERATLSCRASQSVSSYLAWYQQKPGQAPRLLIYDASNRATGIPARFSGSGSGTDFT |
| | LTISSLEPEDFAVYYCQQSSNWPRTFGQGTKVEIK (SEQ ID NO: 626) |
| VL | DIQMTQSPSSLSASVGDRVSITCRASQGISSWLAWYQQKPEKAPKSLIYAASNLRSGVPSRFSGSGSGTDFT |
| | LTISSLQPEDFATYYCQQYYSYPRTFGQGTKVEIK (SEQ ID NO: 628) |
| VL | EIVLTQSPATLSLSPGERATLSCRASQSVSSYLAWYQQKPGQAPRLLIYDASNRATGIPARFSGSGSGTDFT |
| | LTISSLEPEDFAVYYCQQRSNWPLTFGGGTKVEIK (SEQ ID NO: 629) |
| VL | DIQMTQSPSSLSASVGDRVTITCRASQGISSWLAWYQQKPEKAPKSLIYAASSLQSGVPSRFSGSGSGTDFT |
| | LTISSLQPEDFATYYCQQYYSYPRTFGQGTKVEIK (SEQ ID NO: 630) |

Group B

| | |
|---|---|
| VH | QVQLQQPGAELVKPGASVKLSCKASGYTFTSYYLYWMKQRPGQGLEWIGGVNPSNGGTNFSEKFKSKATLTV |
| | DKSSSTAYMQLSSLTSEDSAVYYCTRRDSNYDGGFDYWGQGTTLTVSSAK (SEQ ID NO: 631) |
| VH | QVQLQQPGAELVKPGTSVKLSCKASGYTFTNYYMYWVKQRPGQGLEWIGGINPSNGGTNFNEKFKNKATLTV |
| | DSSSSTTYMQLSSLTSEDSAVYYCTRRDYRFDMGFDYWGQGTTLTVSSAK (SEQ ID NO: 632) |
| VH | MDWTWSILFLVAAPTGAHSQVQLVQSGVEVKKPGASVKVSCKASGYTFTNYYMYWVRQAPGQGLEWMGGINP |
| | SNGGTNFNEKFKNRVTLTTDSSTTTAYMELKSLQFDDTAVYYCARRDYRFDMGFDYWGQGTTVTVSS (SEQ |
| | ID NO: 633) |
| VH | QVQLVQSGVEVKKPGASVKVSCKASGYTFTNYYMYWVRQAPGQGLEWMGGINPSNGGTNFNEKFKNRVTLTT |
| | DSSTTTAYMELKSLQFDDTAVYYCARRDYRFDMGFDYWGQGTTVTVSS (SEQ ID NO: 634) |
| VH | EVQLVLSGGGFVQPGGSLKLSCAASGFTFSSYAMSWVRQNPERRLVWVATITGGGRNTYYPDSVKGRFTISR |
| | DNAKNTLYLQMSSLRSEDTAMYYCTRQGYDGYTWFAYWGQGTLVTVS (627) |
| VL | DIVLTQSPTSLAVSLGQRATISCRASKSVSTSGFSYLHWYQQKPGQPPKLLIFLASNLESGVPARFSGSGSG |
| | TDFTLNIHPVEEEDAATYYCQHSWELPLTFGAGTKLELK (SEQ ID NO: 635) |
| VL | DIVLTQSPASLAVSLGQRAAISCRASKGVSTSGYSYLHWYQQKPGQSPKLLIYLASYLESGVPARFSGSGSG |
| | TDFTLNIHPVEEEDAATYYCQHSRDLPLTFGTGTKLELK (SEQ ID NO: 636) |
| VL | MAPVQLLGLLVLFLPAMRCEIVLTQSPATLSLSPGERATLSCRASKGVSTSGYSYLHWYQQKPGQAPRLLIY |
| | LASYLESGVPARFSGSGSGTDFTLTISSLEPEDFAVYYCQHSRDLPLTFGGGTKVEIK (SEQ ID |
| | NO: 637) |
| VL | EIVLTQSPATLSLSPGERATLSCRASKGVSTSGYSYLHWYQQKPGQAPRLLIYLASYLESGVPARFSGSGSG |
| | TDFTLTISSLEPEDFAVYYCQHSRDLPLTFGGGTKVEIK (SEQ ID NO: 638) |
| VL | MAPVQLLGLLVLFLPAMRCEIVLTQSPLSLPVTPGEPASISCRASKGVSTSGYSYLHWYLQKPGQSPQLLIY |
| | LASYLESGVPDRFSGSGSGTDFTLKISRVEAEDVGVYYCQHSRDLPLTFGQGTKLEIK (SEQ ID |
| | NO: 639) |
| VL | EIVLTQSPLSLPVTPGEPASISCRASKGVSTSGYSYLHWYLQKPGQSPQLLIYLASYLESGVPDRFSGSGSG |
| | TDFTLKISRVEAEDVGVYYCQHSRDLPLTFGQGTKLEIK (SEQ ID NO: 640) |
| VL | MAPVQLLGLLVLFLPAMRCDIVMTQTPLSLPVTPGEPASISCRASKGVSTSGYSYLHWYLQKPGQSPQLLIY |
| | LASYLESGVPDRFSGSGSGTAFTLKISRVEAEDVGLYYCQHSRDLPLTFGQGTKLEIK (SEQ ID |
| | NO: 641) |
| VL | DIVMTQTPLSLPVTPGEPASISCRASKGVSTSGYSYLHWYLQKPGQSPQLLIYLASYLESGVPDRFSGSGSG |
| | TAFTLKISRVEAEDVGLYYCQHSRDLPLTFGQGTKLEIK (SEQ ID NO: 642) |
| VL | DIVLTQSPTSLAVSLGQRATISCRASESVDNSGISFMNWFQQKPGQPPKLLIYAASNPGSGVPARFSGSGSG |
| | TDFSLNIHPMEEDDTAMYFCQQSKEVPWTFGGGTELEIKR (SEQ ID NO: 725) |
| HC | MAVLGLLFCLVTFPSCVLSQVQLVQSGVEVKKPGASVKVSCKASGYTFTNYYMYWVRQAPGQGLEWMGGINP |
| | SNGGTNFNEKFKNRVTLTTDSSTTTAYMELKSLQFDDTAVYYCARRDYRFDMGFDYWGQGTTVTVSSASTKG |
| | PSVFPLAPCSRSTSESTAALGCLVKDYFPEPVTVSWNSGALTSGVHTFPAVLQSSGLYSLSSVVTVPSSSLG |
| | TKTYTCNVDHKPSNTKVDKRVESKYGPPCPPCPAPEFLGGPSVFLFPPKPKDTLMISRTPEVTCVVVDVSQE |
| | DPEVQFNWYVDGVEVHNAKTKPREEQFNSTYRVVSVLTVLHQDWLNGKEYKCKVSNKGLPSSIEKTISKAKG |
| | QPREPQVYTLPPSQEEMTKNQVSLTCLVKGFYPSDIAVEWESNGQPENNYKTTPPVLDSDGSFFLYSRLTVD |
| | KSRWQEGNVFSCSVMHEALHNHYTQKSLSLSLGK (SEQ ID NO: 643) |
| HC | QVQLVQSGVEVKKPGASVKVSCKASGYTFTNYYMYWVRQAPGQGLEWMGGINPSNGGTNFNEKFKNRVTLTT |
| | DSSTTTAYMELKSLQFDDTAVYYCARRDYRFDMGFDYWGQGTTVTVSSASTKGPSVFPLAPCSRSTSESTAA |
| | LGCLVKDYFPEPVTVSWNSGALTSGVHTFPAVLQSSGLYSLSSVVTVPSSSLGTKTYTCNVDHKPSNTKVDK |
| | RVESKYGPPCPPCPAPEFLGGPSVFLFPPKPKDTLMISRTPEVTCVVVDVSQEDPEVQFNWYVDGVEVHNAK |
| | TKPREEQFNSTYRVVSVLTVLHQDWLNGKEYKCKVSNKGLPSSIEKTISKAKGQPREPQVYTLPPSQEEMTK |
| | NQVSLTCLVKGFYPSDIAVEWESNGQPENNYKTTPPVLDSDGSFFLYSRLTVDKSRWQEGNVFSCSVMHEAL |
| | HNHYTQKSLSLSLGK (SEQ ID NO: 644) |
| HC | MAVLGLLFCLVTFPSCVLSQVQLVQSGVEVKKPGASVKVSCKASGYTFTNYYMYWVRQAPGQGLEWMGGINP |
| | SNGGTNFNEKFKNRVTLTTDSSTTTAYMELKSLQFDDTAVYYCARRDYRFDMGFDYWGQGTTVTVSSASTKG |
| | PSVFPLAPSSKSTSGGTAALGCLVKDYFPEPVTVSWNSGALTSGVHTFPAVLQSSGLYSLSSVVTVPSSSLG |
| | TQTYICNVNHKPSNTKVDKKVEPKSCDKTHTCPPCPAPELLGGPSVFLFPPKPKDTLMISRTPEVTCVVVDV |
| | SHEDPEVKFNWYVDGVEVHNAKTKPREEQYNSTYRVVSVLTVLHQDWLNGKEYKCKVSNKALPAPIEKTISK |
| | AKGQPREPQVYTLPPSRDELTKNQVSLTCLVKGFYPSDIAVEWESNGQPENNYKTTPPVLDSDGSFFLYSKL |
| | TVDKSRWQQGNVFSCSVMHEALHNHYTQKSLSLSPGK (SEQ ID NO: 645) |
| HC | QVQLVQSGVEVKKPGASVKVSCKASGYTFTNYYMYWVRQAPGQGLEWMGGINPSNGGTNFNEKFKNRVTLTT |
| | DSSTTTAYMELKSLQFDDTAVYYCARRDYRFDMGFDYWGQGTTVTVSSASTKGPSVFPLAPSSKSTSGGTAA |
| | LGCLVKDYFPEPVTVSWNSGALTSGVHTFPAVLQSSGLYSLSSVVTVPSSSLGTQTYICNVNHKPSNTKVDK |
| | KVEPKSCDKTHTCPPCPAPELLGGPSVFLFPPKPKDTLMISRTPEVTCVVVDVSHEDPEVKFNWYVDGVEVH |
| | NAKTKPREEQYNSTYRVVSVLTVLHQDWLNGKEYKCKVSNKALPAPIEKTISKAKGQPREPQVYTLPPSRDE |
| | LTKNQVSLTCLVKGFYPSDIAVEWESNGQPENNYKTTPPVLDSDGSFFLYSKLTVDKSRWQQGNVFSCSVMH |
| | EALHNHYTQKSLSLSPGK (SEQ ID NO: 646) |
| LC | MAPVQLLGLLVLFLPAMRCEIVLTQSPATLSLSPGERATLSCRASKGVSTSGYSYLHWYQQKPGQAPRLLIY |
| | LASYLESGVPARFSGSGSGTDFTLTISSLEPEDFAVYYCQHSRDLPLTFGGGTKVEIKRTVAAPSVFIFPPS |
| | DEQLKSGTASVVCLLNNFYPREAKVQWKVDNALQSGNSQESVTEQDSKDSTYSLSSTLTLSKADYEKHKVYA |
| | CEVTHQGLSSPVTKSFNRGEC (SEQ ID NO: 647) |
| LC | EIVLTQSPATLSLSPGERATLSCRASKGVSTSGYSYLHWYQQKPGQAPRLLIYLASYLESGVPARFSGSGSG |
| | TDFTLTISSLEPEDFAVYYCQHSRDLPLTFGGGTKVEIKRTVAAPSVFIFPPSDEQLKSGTASVVCLLNNFY |
| | PREAKVQWKVDNALQSGNSQESVTEQDSKDSTYSLSSTLTLSKADYEKHKVYACEVTHQGLSSPVTKSFNRG |
| | EC (SEQ ID NO: 648) |
| LC | MAPVQLLGLLVLFLPAMRCEIVLTQSPLSLPVTPGEPASISCRASKGVSTSGYSYLHWYLQKPGQSPQLLIY |
| | LASYLESGVPDRFSGSGSGTDFTLKISRVEAEDVGVYYCQHSRDLPLTFGQGTKLEIKRTVAAPSVFIFPPS |
| | DEQLKSGTASVVCLLNNFYPREAKVQWKVDNALQSGNSQESVTEQDSKDSTYSLSSTLTLSKADYEKHKVYA |
| | CEVTHQGLSSPVTKSFNRGEC (SEQ ID NO: 649) |
| LC | EIVLTQSPLSLPVTPGEPASISCRASKGVSTSGYSYLHWYLQKPGQSPQLLIYLASYLESGVPDRFSGSGSG |
| | TDFTLKISRVEAEDVGVYYCQHSRDLPLTFGQGTKLEIKRTVAAPSVFIFPPSDEQLKSGTASVVCLLNNFY |
| | PREAKVQWKVDNALQSGNSQESVTEQDSKDSTYSLSSTLTLSKADYEKHKVYACEVTHQGLSSPVTKSFNRG |
| | EC (SEQ ID NO: 650) |
| LC | MAPVQLLGLLVLFLPAMRCDIVMTQTPLSLPVTPGEPASISCRASKGVSTSGYSYLHWYLQKPGQSPQLLIY |
| | LASYLESGVPDRFSGSGSGTAFTLKISRVEAEDVGLYYCQHSRDLPLTFGQGTKLEIKRTVAAPSVFIFPPS |
| | DEQLKSGTASVVCLLNNFYPREAKVQWKVDNALQSGNSQESVTEQDSKDSTYSLSSTLTLSKADYEKHKVYA |
| | CEVTHQGLSSPVTKSFNRGEC (SEQ ID NO: 651) |
| LC | DIVMTQTPLSLPVTPGEPASISCRASKGVSTSGYSYLHWYLQKPGQSPQLLIYLASYLESGVPDRFSGSGSG |
| | TAFTLKISRVEAEDVGLYYCQHSRDLPLTFGQGTKLEIKRTVAAPSVFIFPPSDEQLKSGTASVVCLLNNFY |
| | PREAKVQWKVDNALQSGNSQESVTEQDSKDSTYSLSSTLTLSKADYEKHKVYACEVTHQGLSSPVTKSFNRG |
| | EC (SEQ ID NO: 652) |

Group C

| | |
|---|---|
| VH | DVQLQESGPGLVKPSQSLSLTCTVTGYSITSDYAWNWIRQFPGNKLEWMGYINYSGSTSYNPSLKSRISITR |
| | DTSKNQFFLQLNSVTTEDTATYYCARWIGSSAWYFDVWGAGTTVTV (SEQ ID NO: 726) |
| VL | DVLMTQTPLSLPVSLGDQASISCRSGQNIVHSNGNTYLEWYLQKPGQSPKLLIYKVSNRFFGVPDRISGSGS |
| | GTDFTLKISRVEAEDLGVYFCFQGSHVPFTFGSGTKLEIK (SEQ ID NO: 727) |
| VH | QVQLQQPGAELVKPGASVKLSCKASGYTFTTYYLYWVRQRPGQGLEWIGGINPSNGGTNFNEKFKSKATLTV |
| | DKSSSTAYMQLNSLTSEDSAVYYCTRRDYRYDRGFDYWGQGTSVTV (SEQ ID NO: 728) |
| VL | DIVLTQSPASLAVSLGQRATISCRASKSVSTSGFNYIHWYQQKPGQPPKLLIYLASNLESGVPARFSGSGSG |
| | TDFTLNIHPVEDEDAATYYCQHSRELPLTFGAGTKLEIK (SEQ ID NO: 729) |
| VH | QVQLQQSGAELVKPGASVKMSCKAFGYTFTTYPIEWMKQNHGKSLEWIGNFHPYNDDTKYNEKFKGKAKLTV |
| | EKSSTTVYLELSRLTSDDSAVYYCARENYGSHGGFVYWGQGTLVTV (SEQ ID NO: 730) |
| VL | ENVLTQSPAIMSASPGEKVTMTCRASSSVISSYLHWYQQKSGASPKLWIYSTSNLASGVPDRFSGSGSGTSY |
| | SLTISSVEAEDAATYYCQQYNGYPLTFGAGTKLEIK (SEQ ID NO: 731) |

Group D

LFTVTVPKELYIIEHGSNVTLECNFDTGSHVNLGAITASLQKVENDTSPHRERATLLEEQLPLGKASFHIPQ
VQVRDEGQYQCIIIYGVAWDYKYLTLKVKASYRKINTHILKVPETDEVELTCQATGYPLAEVSWPNVSVPAN
TSHSRTPEGLYQVTSVLRLKPPPGRNFSCVFWNTHVRELTLASIDLQSQMEPRTHPTWEPKSCDKTHTCPPC
PAPELLGGPSVFLFPPKPKDTLMISRTPEVTCVVVDVSHEDPEVKFNWYVDGVEVHNAKTKPREEQYNSTYR
VVSVLTVLHQDWLNGKEYKCKVSNKALPAPIEKTISKAKGQPREPQVYTLPPSRDELTKNQVSLTCLVKGFY
PSDIAVEWESNGQPENNYKTTPPVLDSDGSFFLYSKLTVDKSRWQQGNVFSCSVMHEALHNHYTQKSLSLSP
GK (SEQ ID NO: 732)

Group E

| | |
|---|---|
| VH | EVQLVQSGAEVKKPGASVKVSCKASGYRFTSYGISWVRQAPGQGLEWMGWISAYNGNTNYAQKLQGRVTMTT |
| | DTSTNTAYMELRSLRSDDTAVYYCARDADYSSGSGYWGQGTLVTVSS (SEQ ID NO: 733) |
| VH | QVQLVQSGAEVKKPGASVRVSCKASGYTLTSYYIHWVRQAPGQGLEWMGIINPRGATISYAQKFQGRVTMTR |
| | DTSTSTVYMELRNLKSEDTALYYCATAGIYGFDFDYWGRGTLVTVSS (SEQ ID NO: 734) |
| VH | QVQLQESGPGLVKPSQTLSLTCTVSGGSISSGAYYWSWIRQHPGKGLEWIGYIYYNGNTYYNPSLRSLVTIS |
| | VDASKNQFSLKLSSVTAADTAVYYCARASDYVWGGYRYMDAFDIWGRGTLITVSS (SEQ ID NO: 735) |
| VH | GAHSEVQLVQSGGGVVQPGRSLRLSCAASGFTFSSYWCDRMSWVRQAPGKGLEWVSAISGSGGSTYYADSVK |
| | GRFTISRDNSKNTLYLQMNSLRAEDTAVYYCAKENWGSYFDLWGQGTTVTVSS (SEQ ID NO: 736) |
| VL | SYELTQPPSVSVSPGQTARITCSGDALPKQYAYWYQQKPGQAPVMVIYKDTERPSGIPERFSGSSSGTKVTL |
| | TISGVQAEDEADYYCQSADNSITYRVFGGGTKVTVL (SEQ ID NO: 737) |
| VL | QSALTQPASVSGSPGQSITISCTGTSNDVGGYNYVSWYQHHPGKAPKLIIYDVTNRPSGVSDRFSGSKSGNT |
| | ASLTISGLLAEDEGDYYCSSYTIVTNFEVLFGGGTKLTV (SEQ ID NO: 738) |
| VL | QSVLTQPPSASGTPGQRVTISCSGSNSNIGSNSVNWYQQLPGTAPKLLIYGNNQRPSGVPDRFSGSKSGTSA |
| | SLAISGLQSENEADYYCAAWDDSLNGPVFGRGTKVTVLGE (SEQ ID NO: 739) |
| VL | GVHSDIVMTQSPSTLSASVGDRVTITCRASQGISSWLAWYQQKPGRAPKVLIYKASTLESGVPSRFSGSGSG |
| | TDFTLTISSLQPEDFATYYCQQSYSTPWTFGQGTKLEIKR (SEQ ID NO: 740) |

Group F

| | |
|---|---|
| VH | QVQLVQSGHEVKQPGASVKMSCKASGYSFTSSWIHWVKQAPGQGLEWIGYIYPSTGFTEYNQKFKDRATLTA |
| | DKSTSTAYMELSSLRSEDTAVYYCARWRDSSGYHAMDYWGQGTLVTVSS (SEQ ID NO: 741) |
| VH | QVQLVQSGHEVKQPGASVKMSCKASGYSFTSSWIHWVRQAPGQGLEWIGYIYPSTGFTEYNQKFKDRATLTA |
| | DKSTSTAYMELSSLRSEDTAVYYCARWRDSSGYHAMDYWGQGTLVTVSS (SEQ ID NO: 742) |
| VL | EIVLTQSPATLSLSPGQRLTISCRASQSVSTSGYSYMHWYQQKPDQSPKLLIKFGSNLESGIPARFSGSGSG |
| | TDFTLTISSLEPEDFATYYCQHSWEIPYTFGQGTKLEIK (SEQ ID NO: 743) |
| VL | DIVLTQSPATLSLSPGQRLTISCRASQSVSTSGYSYMHWYQQKPDQSPKLLIKFGSNLESGIPARFSGSGSG |
| | TDFTLTISSLEPEDFAVYYCQHSWEIPYTFGQGTKLEIK (SEQ ID NO: 744) |

Group H

| | |
|---|---|
| VH | QGQLVQSGAEVKKPGASVKVSCKASGYTFTDYEMHWVRQAPIHGLEWIGVIESETGGTAYNQKFKGRVTITA |
| | DKSTSTAYMELSSLRSEDTAVYYCAREGITTVATTYYWYFDVWGQGTTVTVSS (SEQ ID NO: 745) |
| VL | DVVMTQSPLSLPVTLGQPASISCRSSQSIVHSNGNTYLEWYLQKPGQSPQLLIYKVSNRFSGVPDRFSGSGS |
| | GTDFTLKISRVEAEDVGVYYCFQGSHVPLTFGQGTKLEIK (SEQ ID NO: 746) |

Group I

| | |
|---|---|
| VH | MGLGLQWVFFVALLKGVHCEVRLLESGGGLVKPEGSLKLSCVASGFTFSDYFMSWVRQAPGKGLEWVAHIYT |
| | KSYNYATYYSGSVKGRFTISRDDSRSMVYLQMNNLRTEDTATYYCTRDGSGYPSLDFWGQGTQVTVSSATTT |
| | APSVYPLAPACDSTTKS (SEQ ID NO: 747) |
| VL | YELTQPPSASVNVGETVKITCSGDQLPKYFADWFHQRSDQTILQVIYDDNKRPSGIPERISGSSSGTTATLT |
| | IRDVRAEDEGDYYCFSGYVDSDSKLYVFGSGTQLTVLGGPKSSPKVTVFPPSPEELRTNKATLVCLVNDFYP |
| | GSATVTWKANGATINDGVKTTKPSKQGQNYMTSSYLSLTADQWKSHNRVSCQVTHEGETVEKSLSPAECL |
| | (SEQ ID NO: 748) |
| Bs | METDTLLLWVLLLWVPGSTGDAAQPARRARRTKLGTELGSPGLQEFEVRLLESGGGLVKPEGSLKLSCVASG |
| Ab | FTFSDYFMSWVRQAPGKGLEWVAHIYTKSYNYATYYSGSVKGRFTISRDDSRSMVYLQMNNLRTEDTATYYC |
| | TRDGSGYPSLDFWGQGTQVTVSSGGGGSDIQMTQSPSSLPASLGDRVTINCQASQDISNYLNWYQQKPGKAP |
| | KLLIYYTNKLADGVPSRFSGSGSGRDSSFTISSLESEDIGSYYCQQYYNYPWTFGPGTKLEIKGGGGSGGGG |
| | SGGGGSEVQLVESGGGLVQPGKSLKLSCEASGFTFSGYGMHWVRQAPGRGLESVAYITSSSINIKYADAVKG |
| | RFTVSRDNAKNLLFLQMNILKSEDTAMYYCARFDWDKNYWGQGTMVTVSSGGGGSYELTQPPSASVNVGETV |
| | KITCSGDQLPKYFADWFHQRSDQTILQVIYDDNKRPSGIPERISGSSSGTTATLTIRDVRAEDEGDYYCFSG |
| | YVDSDSKLYVFGSGTQLTVLGPRGGPEQKLISEEDLNSAVDHHHHHH (SEQ ID NO: 749) |

Group J

| | |
|---|---|
| VH | QLVQSGAEVKKPGASVKVSCKASGYTFTSYGISWVRQAPGQGLEWMGWISAYNGNTNYAQKLQGRVTMTTDT |
| | STSTATMELRSLRSDDTAVYYCARGRGYSYGIDAFDIWGQGTMVT (SEQ ID NO: 750) |
| VH | LSYVLTQPPSVSVSPGQTARITCSGDALPKQYAYWYQQKPGQAPVLVIYKDSERPSGIPERFSGSSSGTTVT |
| | LTISGVQAEDEADYYCQSADSSGTYVVFGGGTKLTVLGQP (SEQ ID NO: 751) |

Group K

| | |
|---|---|
| VH | QVQLQQSGPGLVRPSQTLSLSCDISGDSVSSNSATWNWIRQSPSRGLEWLGRTFYRSKWYHDYALSVKSRIT |
| | INPDTSKNQFSLQLNSVSPGDTAVYFCVREDIDGRLDYWGQGTLVTVSS (SEQ ID NO: 752) |
| VH | QVQLVQSGSELKKPGASVKISCKASGYIFSDNGVNWVRQAPGQGLEWMGWINTKIGNPTYAQGFTGRFVFSL |
| | DTSVSTTYLQISSLQAGDTAVYYCAREHDYYYGMDVWGQGTTVTVSS (SEQ ID NO: 753) |
| VH | MAEVQLLESGAEVKKPGASVKVSCKASGYTFTSHYMHWVRQAPGQGLEWMGVINPSGGSTSYAQKFQGRVTM |
| | TRDTSTSTVYMDLSSLRSEDTAVYYCARRSEAYYHGMDVWGQGTTVTVSS (SEQ ID NO: 754) |
| VH | EVQLVQSGSELKKPGASVKISCKASGYIFSDNGVNWVRQAPGQGLEWMGWINTKIGNPTYAQGFTGRFVFSL |
| | DTSISTTYLQISSLQAGDTAVYYCAREHDYYYGMDVWGQGTTVTVSS (SEQ ID NO: 755) |
| VH | QVQLVESGGGLVQPGGSLRLSCEATGFTFSRYWMHWVRQAPGKGLEWVSSISSSSSYIYYADSVKGRFTISR |
| | DNAKNSLYLQMNSLRAEDTAVYYCARDTLEYYGSGILENAMGYYGMDVWGQGTTVTVSS (SEQ ID |
| | NO: 756) |
| VH | EVQLVESGGGLVRPGGSLRLACAASGFSFSDYYMTWIRQAPGRGLEWIAYISDSGQTVHYADSVKGRFTISR |
| | DNTKNSLFLQVNTLRAEDTAVYYCAREDLLGYYLQSWGQGTLVTVSS (SEQ ID NO: 757) |
| VH | EVQLVESGGGVVQPGRSLRLSCAASGFTFSSYWMSWVRQAPGKGLEWVANIKQDGSEKYYVDSVKGRFTISR |
| | DNAKNSLYLQMNSLRAEDTAVYYCAREGEHDAFDIWGQGTMVTVSS (SEQ ID NO: 758) |
| VH | QVQLVQSGSELKKPGASVKISCKASGYIFSDNGVNWVRQAPGQGLEWMGWINTKIGNPTYAQGFTGRFVFSL |
| | DTSVSTTYLQISSLQAGDTAVYYCAREHDYYYGMDVWGQGTTVTVSS (SEQ ID NO: 759) |
| VH | QVQLVQSGSELKKPGASVKISCKASGYIFSDNGVNWVRQAPGQGLEWMGWINTKIGNPTYAQGFTGRFVFSL |
| | DTSVSTTYLQISSLQAGDTAVYYCAREHDYYYGMDVWGQGTTVTVSS (SEQ ID NO: 760) |
| VH | QVQLVQSGAEVKKPGASVKVSCKASGYTFTRYTMHWVRQAPGQRLEWMGWINAGNGNTKYSQKFQGRVTITR |
| | DTSASTAYMELSSLRSEDTAVYYCAKVSAGTESWFDPWGQGTLVTVSS (SEQ ID NO: 761) |
| VH | QVQLVQSGAEVKKPGASVKVSCKASGYTFTSYGISWVRQAPGQGLEWMGWISAYNGNTNYAQKLQGRVTMTT |
| | DTSTSTAYMELRSLRSDDTAVYYCARGLYGDEDYWGQGTLVTVSS (SEQ ID NO: 762) |
| VH | QVQLVQSGSELKKPGASVKISCKASGYIFSDNGVNWVRQAPGQGLEWMGWINTKIGNPTYAQGFTGRFVFSL |
| | DTSISTTYLQISSLQAGDTAVYYCAREHDYYYGMDVWGQGTTVTVSS (SEQ ID NO: 763) |
| VH | QMQLVQSGAEVKKPGESLKISCKGSGYSFTSYWIGWVRQMPGKGLEWMGIIYPGDSDTRYSPSFQGQVTISA |
| | DKSISTAYLQWSSLKASDTAMYYCASGVTRKRYSSSWPPFDYWGQGTLVTVSS (SEQ ID NO: 764) |
| VH | QVQLQQWGAGLLKSSETLSLSCAVYGGTFRDDHWSWIRQPPGKGLEWIGESHHTGRTIYNPSLRSRVTMSID |
| | TSKNEFSLILRSVTAADTATYFCARGNNYVWGNQEDFWGQGTLVTVSS (SEQ ID NO: 765) |
| VH | QVQLQQSGPGLVRPSQTLSLSCDISGDSVSSNSATWNWIRQSPSRGLEWLGRTFYRSKWYHDYALSVKSRIT |
| | INPDTSKNQFSLQLNSVSPGDTAVYFCVREDIDGRLDYWGQGTLVTVSS (SEQ ID NO: 766) |
| VH | EVQLVESGGALVQPGGSLRLSCAVSGFTFSDHYMDWVRQAPGKGLEWVARSRNKGNSYTTEYAASVRGRFTI |
| | SRDDSKNSLYLQMNSLKTEDTAVYYCVRVGVVPALDGMDVWGQGTTVTVSS (SEQ ID NO: 767) |
| VH | EVQLVESGGGLVQPGGSLRLSCAASGFTFSSYWMHWVRQAPGKGLEWVSSISSSSSYIYYADSVKGRFTISR |
| | DNAKNSLYLQMNSLRAEDTAVYYCARDTLEYYGSGILENAMGYYGMDVWGQGTTVTVSS (SEQ ID |
| | NO: 768) |
| VH | EVQLLESGGGVVQTGRSLRLSCSDSGSTERSQAMHWVRQTPGKGLEWLAVTSHDGSKTYYADSVKGRFTISR |
| | DNSKNTLYLQMNSLRGEDTAVYYCARGGRGYTYDHSFFDYWGQGTLVTVSS (SEQ ID NO: 769) |
| VH | QVQLVQSGSELKKPGASVKISCKASGYIFSDNGVNWVRQAPGQGLEWMGWINTKDGNPTYAQGFTGRFVFSL |
| | DTSISTTYLQISSLQAGDTAVYYCAREHDYYYGMDVWGQGTTVTVSS (SEQ ID NO: 770) |
| VH | QVQLVQSGSELKKPGASVKISCKASGYIFSDNGVNWVRQAPGQGLEWMGWINTKTGNPTYAQGFTGRFVFSL |
| | DTSISTTYLQISSLQAGDTAVYYCAREHDYYYGMDVWGQGTTVTVSS (SEQ ID NO: 771) |
| VH | QVQLVQSGSELKKPGASVKISCKASGYTFSDNGVNWVRQAPGQGLEWMGWINTKDGNPTYAQGFTGRFVFSL |
| | DTSISTTYLQISSLQAGDTAVYYCAREHDYYYGMDVWGQGTTVTVSS (SEQ ID NO: 772) |
| VH | QVQLVQSGSELKKPGASVKISCKASGYTFSDNGVNWVRQAPGQGLEWMGWINTKTGNPTYAQGFTGRFVFSL |
| | DTSISTTYLQISSLQAGDTAVYYCAREHDYYYGMDVWGQGTTVTVS (SEQ ID NO: 773) |
| VH | QVQLVQSGSELKKPGASVKISCKASGYKFSDNGVNWVRQAPGQGLEWMGWINTKSGNPTYAQGFTGRFVFSL |
| | DTSISTTYLQISSLQAGDTAVYYCAREHDYYYGMDVWGQGTTVTVSS (SEQ ID NO: 774) |
| VH | QVQLVQSGSELKKPGASVKISCKASGYTFSDNGVNWVRQAPGQGLEWMGWINTKSGNPTYAQGFTGRFVFSL |
| | DTSISTTYLQISSLQAGDTAVYYCAREHDYYYGMDVWGQGTTVTVSS (SEQ ID NO: 775) |
| VH | QVQLVQSGSELKKPGASVKISCKASGYKFSDNGVNWVRQAPGQGLEWMGWINTKDGNPTYAQGFTGRFVFSL |
| | DTSISTTYLQISSLQAGDTAVYYCAREHDYYYGMDVWGQGTTVTVSS (SEQ ID NO: 776) |
| VL | LPVLTQPASVSGSPGQSITISCTGTSSDVGGYNYVSWYQQHPGKAPKLMIYEVSKRPSGVPDRFSGSKSGNT |
| | ASLTVSGLQAEDEADYYCSAWDDSLNADVFGGGTKLTVL (SEQ ID NO: 777) |
| VL | QPVLTQPPSASGTPGQRVTISCSGSSSNIGTNTVNWYQQVPGTAPKLLIHGNDQRPSGVPDRFSGSKSDTSA |
| | SLAITGLQSDDDADYYCSAWDDSLNADVFGGGTKLTVL (SEQ ID NO: 778) |
| VL | QAVLTQPPSASATPGQRVTISCSGSDSNIGTNYVYWYQQFPGTAPQPLIYRDNQRPSGVPDRFSGSKSGTSA |
| | SLAISGLRSEDEATYFCSTWDDSLNGWVFGGGTKLTVL (SEQ ID NO: 779) |
| VL | QPVLTQPRSVSGSPGQSITTSCTGTSSDVGGYNYVSWYQQHPGKAPKLMIYEVSNRPSGVSNRFSGSKSGNT |
| | ASLTISGLQAEDEADYYCSSYTSSSTLEVFGTGTKVTVL (SEQ ID NO: 780) |
| VL | YELMQPPSVSGAPGQRVTISCTGSSSNIGAAYDVHWYQQLPGKAPKLVMFANSNRPSGVPDRFSGSKSGTSA |
| | SLAITGLQAEDEADYYCQSYDISLRAYVFGTGTKLTVL (SEQ ID NO: 781) |
| VL | SYELMQPPSASGTPGQRVTISCSGSSSNIGTNTVNWYQHLPGTAPKLLIYSNNQRPSGVPDRFSGSKSGTSA |
| | SLAISGLQSEDEADYYCATWDDSPNGWVFGGGTKLTVL (SEQ ID NO: 782) |
| VL | QAVLTQPPSVSAAPGQRVTISCSGSNSNIADTYVSWYQQLPGTAPRLLIYDNDQRPSGIPDRFSGSKSGTSA |
| | TLGITGLQTGDEADYYCGTWDSSLSGVFGTGTKVTVL (SEQ ID NO: 783) |
| VL | QSVLTQPASVSGSPGQSVTISCTGSSSDVGAYNFVSWYRQYPGKAPKLLIYEVNKRPSDVPDRFSGSKFGNT |
| | ASLTVSGLQADDEADYYCSSYAGSTDVFGTGTKVTVL (SEQ ID NO: 784) |
| VL | LPVLTQPPSVSGTPGQRVTISCSGSSSNIGSNTVNWYQQLPGTAPKLLIYTNNQRPSGVPDRFSGSKSGTSA |
| | SLAISGLQSEDEADYYCAAWDESLNGDVFGTGTKVTVL (SEQ ID NO: 785) |
| VL | AIRMTQSPSFLSASVGDRVTITCRTSQNIYNYLNWYQQKPGKAPELLIFVASSLQSGVPSRFSGSGSGTDFT |
| | LTISSLQPEDFATYFCLQDHSYPYTFGQGTKVEIK (SEQ ID NO: 786) |
| VL | LPVLTQPPSVSEVPGQRVTISCSGGISNIGSNAVNWYQHFPGKAPKLLIYYNDLLPSGVSDRFSASKSGTSA |
| | SLAISGLRSEDEADYYCAAWDDNLSAYVFATGTKVTVL (SEQ ID NO: 787) |
| VL | QSALTQPPSASGSPGQSVTISCTGTSSDVGGYNYVSWYQHHPGKAPKLMIYEVSKRPSGVPDRFSGSKSAIT |
| | ASLTISGLLTEDEADYYCSAWDDSLNADVFGGGTKVTVL (SEQ ID NO: 788) |
| VL | DIQMTQSPSSLSASVGDRVTITCRASQSISTYLNWYQQKPGKAPKVLITDASSLETGVPSRFSGSGSGTDFT |
| | FTISSLQPEDTATYFCQQYDDLPPTFGQGTKLEIK (SEQ ID NO: 789) |
| VL | QAGLTQPRSVSGSPGQSVTISCTGTSSDVGGYNYVSWYQQHPGKAPKLMIYDVTKRPSGVSNRFSGSKSGNT |
| | ASLTISGLQAEDEADYYCSSYTSSSTYVFGTGTKVTVL (SEQ ID NO: 790) |
| VL | QPVLTQPASVSGSPGQSITISCTGTSSDVGGYNYVSWYQQHPGKAPKLMIYDVSNRPSGVSNRFSGSKSGNT |
| | ASLAITGLQSDDDADYYCSAWDDSLNADVFGGGTKLTVL (SEQ ID NO: 791) |
| VL | QAGLTQPPSVSKGLRQTATLTCTGNSNNIGDQGAAWLQQHQGHPPRLLSYRNNNRPSGISERLSASRSGNIA |
| | SLTITGLQPEDEADYYCSAWDSSLSVWVFGGGTKLTVL (SEQ ID NO: 792) |
| VL | QAVLTQPPSASGTPGQRVTISCSGSSSNIGSNTVNWYQQLPGTAPKLLIYSNNQRPSGVPDRFSGSKSGTSA |
| | SLAISGLQSEDEADYYCAAWDDSLNGYVFGTGTKLTVL (SEQ ID NO: 793) |
| VL | AIRMTQSPSTLSASVGDRVTITCRASENIRNLLAWYQQKPGKAPELLIHGASTLGTGVPSRFSGGGSGTEFT |
| | LTISSLQPDDFATYYCQQYESYFNTFGQGTKVEIK (SEQ ID NO: 794) |

Group L

| | |
|---|---|
| VH | QVQLVESGPGVKKPGSSLKLSCTVSGFTFSSYDYYMHWVRQAPGNGLEWMAVIWYSGSNTYYNDSLKSRFSI |
| | TRDNSKNTAYMQLNSLRAEDTAVYYCARAYFGVDVWGQGTLVTVSS (SEQ ID NO: 795) |
| VL | DIVMTQSPASLSVSVGDRATISCRASQGIGNTLAWYQQKPGQAPKRLLIYRASQGIGNTLAGVPARFSGDGD |
| | GTDFTLTIDDLEEPEDFATYYCQQYDHVPLTFGQGTKLEIK (SEQ ID NO: 796) |

Group M

| | |
|---|---|
| VH | EVQLVQSGAEVKKPGASVKVSCKAFGYTFTTYPIEWMRQAHGQGLEWIGNFHPYNDDTKYNEKFKGRVTMTV |
| | DKSTTTVYMELSSLRSEDTAVYYCARENYGSHGGFVYWGQGTLVTVS (SEQ ID NO: 797) |
| VH | EVQLVQSGAEVKKPGASVKVSCKAFGYTFTTYPIEWMRQAHGQGLEWIGNFHPYNDDTKYNEKFKGRVTMTR |
| | DTSTSTVYMELSSLRSEDTAVYYCARENYGSHGGFVYWGQGTLVTVS (SEQ ID NO: 798) |
| VH | EVQLVQSGAEVKKPGASVKVSCKAFGYTFTTYPIEWVRQAPGQGLEWMGNFHPYNDDTKYNEKFKGRVTMTR |
| | DTSTSTVYMELSSLRSEDTAVYYCARENYGSHGGFVYWGQGTLVTVS (SEQ ID NO: 799) |
| VH | EVQLVQSGAEVKKPGSSVKVSCKASGYTFTTYPIEWVRQAPGQGLEWMGNFHPYNDDTKYNEKFKGRVTITA |
| | DKSTSTAYMELSSLRSEDTAVYYCARENYGSHGGFVYWGQGTLVTVS (SEQ ID NO: 800) |
| VH | EVQLVQSGAEVKKPGSSVKVSCKAFGYTFTTYPIEWMRQAHGQGLEWIGNFHPYNDDTKYNEKFKGRVTITV |
| | DKSTTTVYMELSSLRSEDTAVYYCARENYGSHGGFVYWGQGTLVTVS (SEQ ID NO: 801) |
| VH | EVQLVQSGAEVKKPGSSVKVSCKAFGYTFTTYPIEWMRQAHGQGLEWIGNFHPYNDDTKYNEKFKGRVTITA |
| | DKSTSTAYMELSSLRSEDTAVYYCARENYGSHGGFVYWGQGTLVTVS (SEQ ID NO: 802) |
| VL | ENVLTQSPFSLSASVGDRVTITCRASSSVISSYLHWYQQKPAKAPKLWIYSTSNLASGVPDRFSGSGSGTSY |
| | TLTISSLQPEDFATYYCQQYNGYPLTFGGGTKVEIK (SEQ ID NO: 803) |
| VL | ENVLTQSPFSLSASVGDRVTITCRASSSVISSYLHWYQQKPAKAPKLFIYSTSNLASGVPSRFSGSGSGTDY |
| | TLTISSLQPEDFATYYCQQYNGYPLTFGGGTKVEIK (SEQ ID NO: 804) |
| VL | ENVLTQSPFSLSASVGDRVTITCRASSSVISSYLHWYQQKPAKAPKLWIYSTSNLASGVPDRFSGSGSGTSY |
| | TLTISSLQPEDFATYYCQQYNSYPLTFGGGTKVEIK (SEQ ID NO: 805) |
| VL | ENVMTQSPFSLSASVGDRVTITCRASSSVISSYLHWYQQKPAKAPKLFIYSTSNLASGVPSRFSGSGSGTDY |
| | TLTISSLQPEDFATYYCQQYNGYPLTFGGGTKVEIK (SEQ ID NO: 806) |
| VL | ENVMTQSPFSLSASVGDRVTITCRASSSVISSYLHWYQQKPAKAPKLFIYSTSNLASGVPSRFSGSGSGTDY |
| | TLTISSLQPEDFATYYCQQYNSYPLTFGGGTKVEIK (SEQ ID NO: 807) |
| VL | ENVLTQSPFSLSASVGDRVTITCRASSSVISSYLHWYQQKPAKAPKLFIYSTSNLASGVPSRFSGSGSGTDY |
| | TLTISSLQPEDFATYYCQQYNSYPLTFGGGTKVEIK (SEQ ID NO: 808) |
| VL | ENVLTQSPGTLSLSPGERATLSCRASSSVISSYLHWYQQKPGQAPRLWIYSTSNLASGVPDRFSGSGSGTSY |
| | TLTISRLEPEDFATYYCQQYNGYPLTFGGGTKVEIK (SEQ ID NO: 809) |
| VL | ENVLTQSPGTLSLSPGERATLSCRASSSVISSYLHWYQQKPGQAPRLWIYSTSNLASGVPDRFSGSGSGTSY |
| | TLTISRLEPEDFATYYCQQYNSYPLTFGGGTKVEIK (SEQ ID NO: 810) |

Group N

| | |
|---|---|
| VH | QVQLQQPGAELVKPGASVKLSCKASGYTFTSYYLYWMKQRPGQGLEWIGGVNPSNGGTNFSEKFKSKATLTV |
| | DKSSSTAYMQLSSLTSEDSAVYYCTRRDSNYDGGFDYWGQGTTLTVSSAK (SEQ ID NO: 631) |
| VL | DIVLTQSPTSLAVSLGQRATISCRASKSVSTSGFSYLHWYQQKPGQPPKLLIFLASNLESGVPARFSGSGSG |
| | TDFTLNIHPVEEEDAATYYCQHSWELPLTFGAGTKLELK (SEQ ID NO: 635) |

Group O

| | |
|---|---|
| VH | EVQLVESGGGLVQPGGSLRLSCAASGFTFSDYGMHWVRQAPGKGLEWVAYISSGSYTIYSADSVKGRFTISR |
| | DNAKNTLYLQMSSLRAEDTAVYYCARRGYGSFYEYYFDYWGQGTTVTVS (SEQ ID NO: 1521) |
| VL | QIVLTQSPATLSLSPGERATLSCSASSSVSYMYWYQQKPGQAPRLLIYLTSNRATGIPARFSGSGSGTDYTL |
| | TISSLEPEDFAVYYCQQWSSNPFTFGQGTKLEIK (SEQ ID NO: 1522) |

Group P

| | |
|---|---|
| VH | EVQLVQSGAEVKKPGESLRISCKGSGYTFTTYWMHWVRQATGQGLEWMGNIYPGTGGSNFDEKFKNRVTITA |
| | DKSTSTAYMELSSLRSEDTAVYYCTRWTTGTGAYWGQGTTVTVSS (SEQ ID NO: 1523) |
| VH | EVQLVQSGAEVKKPGESLRISCKGSGYTFTTYWMHWIRQSPSRGLEWLGNIYPGTGGSNFDEKFKNRFTISR |
| | DNSKNTLYLQMNSLRAEDTAVYYCTRWTTGTGAYWGQGTTVTVSS (SEQ ID NO: 1524) |
| VH | EVQLVQSGAEVKKPGESLRISCKGSGYTFTTYWMHWVRQAPGQGLEWMGNIYPGTGGSNFDEKFKNRFTISR |
| | DNSKNTLYLQMNSLRAEDTAVYYCTRWTTGTGAYWGQGTTVTVSS (SEQ ID NO: 1525) |
| VL | EIVLTQSPATLSLSPGERATLSCKSSQSLLDSGNQKNFLTWYQQKPGQAPRLLIYWASTRESGVPSRFSGSG |
| | SGTEFTLTISSLQPDDFATYYCQNDYSYPYTFGQGTKVEIK (SEQ ID NO: 1526) |
| VL | DIQMTQSPSSLSASVGDRVTITCKSSQSLLDSGNQKNFLTWYQQKPGQAPRLLIYWASTRESGIPPRFSGSG |
| | YGTDFTLTINNIESEDAAYYFCQNDYSYPYTFGQGTKVEIK (SEQ ID NO: 1527) |
| VL | EIVLTQSPATLSLSPGERATLSCKSSQSLLDSGNQKNFLTWYQQKPGKAPKLLIYWASTRESGVPSRFSGSG |
| | SGTDFTFTISSLQPEDIATYYCQNDYSYPYTFGQGTKVEIK (SEQ ID NO: 1528) |
| VL | DIVMTQTPLSLPVTPGEPASISCKSSQSLLDSGNQKNFLTWYQQKPGQAPRLLIYWASTRESGVPSRFSGSG |
| | SGTDFTFTISSLEAEDAATYYCQNDYSYPYTFGQGTKVEIK (SEQ ID NO: 1529) |
| VL | EIVLTQSPATLSLSPGERATLSCKSSQSLLDSGNQKNFLTWYQQKPGKAPKLLIYWASTRESGVPSRFSGSG |
| | SGTDFTFTISSLEAEDAATYYCQNDYSYPYTFGQGTKVEIK (SEQ ID NO: 1530) |
| VL | EIVLTQSPDFQSVTPKEKVTITCKSSQSLLDSGNQKNFLTWYQQKPGQAPRLLIYWASTRESGVPSRFSGSG |
| | SGTDFTFTISSLEAEDAATYYCQNDYSYPYTFGQGTKVEIK (SEQ ID NO: 1531) |
| VL | EIVLTQSPATLSLSPGERATLSCKSSQSLLDSGNQKNFLTWYQQKPGQAPRLLIYWASTRESGVPSRFSGSG |
| | SGTDFTFTISSLEAEDAATYYCQNDYSYPYTFGQGTKVEIK (SEQ ID NO: 1532) |
| VL | DIQMTQSPSSLSASVGDRVTITCKSSQSLLDSGNQKNFLTWYLQKPGQSPQLLIYWASTRESGVPSRFSGSG |
| | SGTDFTFTISSLEAEDAATYYCQNDYSYPYTFGQGTKVEIK (SEQ ID NO: 1533) |
| VL | DVVMTQSPLSLPVTLGQPASISCKSSQSLLDSGNQKNFLTWYQQKPGKAPKLLIYWASTRESGVPSRFSGSG |
| | SGTDFTFTISSLEAEDAATYYCQNDYSYPYTFGQGTKVEIK (SEQ ID NO: 1534) |
| HC | EVQLVQSGAEVKKPGESLRISCKGSGYTFTTYWMHWVRQATGQGLEWMGNIYPGTGGSNFDEKFKNRVTITA |
| | DKSTSTAYMELSSLRSEDTAVYYCTRWTTGTGAYWGQGTTVTVSSASTKGPSVFPLAPCSRSTSESTAALGC |
| | LVKDYFPEPVTVSWNSGALTSGVHTFPAVLQSSGLYSLSSVVTVPSSSLGTKTYTCNVDHKPSNTKVDKRVE |
| | SKYGPPCPPCPAPEFLGGPSVFLFPPKPKDTLMISRTPEVTCVVVDVSQEDPEVQFNWYVDGVEVHNAKTKP |
| | REEQFNSTYRVVSVLTVLHQDWLNGKEYKCKVSNKGLPSSIEKTISKAKGQPREPQVYTLPPSQEEMTKNQV |
| | SLTCLVKGFYPSDIAVEWESNGQPENNYKTTPPVLDSDGSFFLYSRLTVDKSRWQEGNVFSCSVMHEALHNH |
| | YTQKSLSLSLGK (SEQ ID NO: 1535) |
| HC | QVQLVQSGAEVKKPGASVKVSCKASGYTFTTYWMHWIRQSPSRGLEWLGNIYPGTGGSNFDEKFKNRFTISR |
| | DNSKNTLYLQMNSLRAEDTAVYYCTRWTTGTGAYWGQGTTVTVSSASTKGPSVFPLAPCSRSTSESTAALGC |
| | LVKDYFPEPVTVSWNSGALTSGVHTFPAVLQSSGLYSLSSVVTVPSSSLGTKTYTCNVDHKPSNTKVDKRVE |
| | SKYGPPCPPCPAPEFLGGPSVFLFPPKPKDTLMISRTPEVTCVVVDVSQEDPEVQFNWYVDGVEVHNAKTKP |
| | REEQFNSTYRVVSVLTVLHQDWLNGKEYKCKVSNKGLPSSIEKTISKAKGQPREPQVYTLPPSQEEMTKNQV |
| | SLTCLVKGFYPSDIAVEWESNGQPENNYKTTPPVLDSDGSFFLYSRLTVDKSRWQEGNVFSCSVMHEALHNH |
| | YTQKSLSLSLGK (SEQ ID NO: 1536) |
| HC | EVQLVQSGAEVKKPGESLRISCKGSGYTFTTYWMHWIRQSPSRGLEWLGNIYPGTGGSNFDEKFKNRFTISR |
| | DNSKNTLYLQMNSLRAEDTAVYYCTRWTTGTGAYWGQGTTVTVSSASTKGPSVFPLAPCSRSTSESTAALGC |
| | LVKDYFPEPVTVSWNSGALTSGVHTFPAVLQSSGLYSLSSVVTVPSSSLGTKTYTCNVDHKPSNTKVDKRVE |
| | SKYGPPCPPCPAPEFLGGPSVFLFPPKPKDTLMISRTPEVTCVVVDVSQEDPEVQFNWYVDGVEVHNAKTKP |
| | REEQFNSTYRVVSVLTVLHQDWLNGKEYKCKVSNKGLPSSIEKTISKAKGQPREPQVYTLPPSQEEMTKNQV |
| | SLTCLVKGFYPSDIAVEWESNGQPENNYKTTPPVLDSDGSFFLYSRLTVDKSRWQEGNVFSCSVMHEALHNH |
| | YTQKSLSLSLGK (SEQ ID NO: 1537) |
| HC | EVQLVQSGAEVKKPGESLRISCKGSGYTFTTYWMHWVRQAPGQGLEWMGNIYPGTGGSNFDEKFKNRFTISR |
| | DNSKNTLYLQMNSLRAEDTAVYYCTRWTTGTGAYWGQGTTVTVSSASTKGPSVFPLAPCSRSTSESTAALGC |
| | LVKDYFPEPVTVSWNSGALTSGVHTFPAVLQSSGLYSLSSVVTVPSSSLGTKTYTCNVDHKPSNTKVDKRVE |
| | SKYGPPCPPCPAPEFLGGPSVFLFPPKPKDTLMISRTPEVTCVVVDVSQEDPEVQFNWYVDGVEVHNAKTKP |
| | REEQFNSTYRVVSVLTVLHQDWLNGKEYKCKVSNKGLPSSIEKTISKAKGQPREPQVYTLPPSQEEMTKNQV |
| | SLTCLVKGFYPSDIAVEWESNGQPENNYKTTPPVLDSDGSFFLYSRLTVDKSRWQEGNVFSCSVMHEALHNH |
| | YTQKSLSLSLGK (SEQ ID NO: 1538) |
| HC | EVQLVQSGAEVKKPGESLRISCKGSGYTFTTYWMHWVRQATGQGLEWMGNIYPGTGGSNFDEKFKNRVTITA |
| | DKSTSTAYMELSSLRSEDTAVYYCTRWTTGTGAYWGQGTTVTVSSASTKGPSVFPLAPCSRSTSESTAALGC |
| | LVKDYFPEPVTVSWNSGALTSGVHTFPAVLQSSGLYSLSSVVTVPSSSLGTKTYTCNVDHKPSNTKVDKRVE |
| | SKYGPPCPPCPAPEFLGGPSVFLFPPKPKDTLMISRTPEVTCVVVDVSQEDPEVQFNWYVDGVEVHNAKTKP |
| | REEQFNSTYRVVSVLTVLHQDWLNGKEYKCKVSNKGLPSSIEKTISKAKGQPREPQVYTLPPSQEEMTKNQV |
| | SLTCLVKGFYPSDIAVEWESNGQPENNYKTTPPVLDSDGSFFLYSRLTVDKSRWQEGNVFSCSVMHEALHNH |
| | YTQKSLSLSLG (SEQ ID NO: 1539) |
| HC | EVQLVQSGAEVKKPGESLRISCKGSGYTFTTYWMHWIRQSPSRGLEWLGNIYPGTGGSNFDEKFKNRFTISR |
| | DNSKNTLYLQMNSLRAEDTAVYYCTRWTTGTGAYWGQGTTVTVSSASTKGPSVFPLAPCSRSTSESTAALGC |
| | LVKDYFPEPVTVSWNSGALTSGVHTFPAVLQSSGLYSLSSVVTVPSSSLGTKTYTCNVDHKPSNTKVDKRVE |
| | SKYGPPCPPCPAPEFLGGPSVFLFPPKPKDTLMISRTPEVTCVVVDVSQEDPEVQFNWYVDGVEVHNAKTKP |
| | REEQFNSTYRVVSVLTVLHQDWLNGKEYKCKVSNKGLPSSIEKTISKAKGQPREPQVYTLPPSQEEMTKNQV |
| | SLTCLVKGFYPSDIAVEWESNGQPENNYKTTPPVLDSDGSFFLYSRLTVDKSRWQEGNVFSCSVMHEALHNH |
| | YTQKSLSLSLG (SEQ ID NO: 1540) |
| LC | EIVLTQSPATLSLSPGERATLSCKSSQSLLDSGNQKNFLTWYQQKPGQAPRLLIYWASTRESGVPSRFSGSG |
| | SGTEFTLTISSLQPDDFATYYCQNDYSYPYTFGQGTKVEIKRTVAAPSVFIFPPSDEQLKSGTASVVCLLNN |
| | FYPREAKVQWKVDNALQSGNSQESVTEQDSKDSTYSLSSTLTLSKADYEKHKVYACEVTHQGLSSPVTKSFN |
| | RGEC (SEQ ID NO: 1541) |
| LC | DIQMTQSPSSLSASVGDRVTITCKSSQSLLDSGNQKNFLTWYQQKPGQAPRLLIYWASTRESGIPPRFSGSG |
| | YGTDFTLTINNIESEDAAYYFCQNDYSYPYTFGQGTKVEIKRTVAAPSVFIFPPSDEQLKSGTASVVCLLNN |
| | FYPREAKVQWKVDNALQSGNSQESVTEQDSKDSTYSLSSTLTLSKADYEKHKVYACEVTHQGLSSPVTKSFN |
| | RGEC (SEQ ID NO: 1542) |
| LC | EIVLTQSPATLSLSPGERATLSCKSSQSLLDSGNQKNFLTWYQQKPGKAPKLLIYWASTRESGVPSRFSGSG |
| | SGTDFTFTISSLQPEDIATYYCQNDYSYPYTFGQGTKVEIKRTVAAPSVFIFPPSDEQLKSGTASVVCLLNN |
| | FYPREAKVQWKVDNALQSGNSQESVTEQDSKDSTYSLSSTLTLSKADYEKHKVYACEVTHQGLSSPVTKSFN |
| | RGEC (SEQ ID NO: 1543) |
| LC | DIVMTQTPLSLPVTPGEPASISCKSSQSLLDSGNQKNFLTWYQQKPGQAPRLLIYWASTRESGVPSRFSGSG |
| | SGTDFTFTISSLEAEDAATYYCQNDYSYPYTFGQGTKVEIKRTVAAPSVFIFPPSDEQLKSGTASVVCLLNN |
| | FYPREAKVQWKVDNALQSGNSQESVTEQDSKDSTYSLSSTLTLSKADYEKHKVYACEVTHQGLSSPVTKSFN |
| | RGEC (SEQ ID NO: 1544) |
| LC | EIVLTQSPATLSLSPGERATLSCKSSQSLLDSGNQKNFLTWYQQKPGKAPKLLIYWASTRESGVPSRFSGSG |
| | SGTDFTFTISSLEAEDAATYYCQNDYSYPYTFGQGTKVEIKRTVAAPSVFIFPPSDEQLKSGTASVVCLLNN |
| | FYPREAKVQWKVDNALQSGNSQESVTEQDSKDSTYSLSSTLTLSKADYEKHKVYACEVTHQGLSSPVTKSFN |
| | RGEC (SEQ ID NO: 1545) |
| LC | EIVLTQSPDFQSVTPKEKVTITCKSSQSLLDSGNQKNFLTWYQQKPGQAPRLLIYWASTRESGVPSRFSGSG |
| | SGTDFTFTISSLEAEDAATYYCQNDYSYPYTFGQGTKVEIKRTVAAPSVFIFPPSDEQLKSGTASVVCLLNN |
| | FYPREAKVQWKVDNALQSGNSQESVTEQDSKDSTYSLSSTLTLSKADYEKHKVYACEVTHQGLSSPVTKSFN |
| | RGEC (SEQ ID NO: 1546) |
| LC | DIQMTQSPSSLSASVGDRVTITCKSSQSLLDSGNQKNFLTWYLQKPGQSPQLLIYWASTRESGVPSRFSGSG |
| | SGTDFTFTISSLEAEDAATYYCQNDYSYPYTFGQGTKVEIKRTVAAPSVFIFPPSDEQLKSGTASVVCLLNN |
| | FYPREAKVQWKVDNALQSGNSQESVTEQDSKDSTYSLSSTLTLSKADYEKHKVYACEVTHQGLSSPVTKSFN |
| | RGEC (SEQ ID NO: 1547) |
| LC | DVVMTQSPLSLPVTLGQPASISCKSSQSLLDSGNQKNFLTWYQQKPGKAPKLLIYWASTRESGVPSRFSGSG |
| | SGTDFTFTISSLEAEDAATYYCQNDYSYPYTFGQGTKVEIKRTVAAPSVFIFPPSDEQLKSGTASVVCLLNN |
| | FYPREAKVQWKVDNALQSGNSQESVTEQDSKDSTYSLSSTLTLSKADYEKHKVYACEVTHQGLSSPVTKSFN |
| | RGEC (SEQ ID NO: 1548) |
| LC | EIVLTQSPATLSLSPGERATLSCKSSQSLLDSGNQKNFLTWYQQKPGQAPRLLIYWASTRESGVPSRFSGSG |
| | SGTDFTFTISSLEAEDAATYYCQNDYSYPYTFGQGTKVEIKRTVAAPSVFIFPPSDEQLKSGTASVVCLLNN |
| | FYPREAKVQWKVDNALQSGNSQESVTEQDSKDSTYSLSSTLTLSKADYEKHKVYACEVTHQGLSSPVTKSFN |
| | RGEC (SEQ ID NO: 1834) |

Group Q

| | |
|---|---|
| VH | EVQLLESGGGLVQPGGSLRLSCSASGFTFSSYTMNWVRQAPGKGLEWVSGISDTGGNTYYTDSVKGRFTVSR |
| | DNSKNTLSLQMNSLRAEDTAVYYCAKDQGGSYPYYFHYWGQGSLVTVSS (SEQ ID NO: 1549) |
| VH | EVQLVESGGGLVQPGGSLRLSCAASGFTVSNNYMSWVRQAPGKGLEWVSVIYSGGFTYYTDSVKGRFTISRH |
| | NSKNTLYLQMNSLRAEDTAVYYCARYYYDTSDYWTFFDYWGQGTLVTVSS (SEQ ID NO: 1550) |
| VH | QVQLVESGGGVVQSGRSLRLSCAASGFTFSSYGMHWVRQAPGKGLEWVAVIWYDGSNIYYSDSVKGRFTISR |
| | ANSKNTLYLQMNSLRAEDTAVYYCARPGHWNYFFEYWGQGTLVTVSS (SEQ ID NO: 1551) |
| VH | EVQLVESGGGLVQPGGSLRLSCGASGFTFRNYDMHWVRQITGKGLEWVSAIGSAGDTYYPDSVKGRFTISRE |
| | NAKNSLYLQMNSLRVGDTAVYYCTRDIHCSSTRCYGMDVWGQGTTVTVSS (SEQ ID NO: 1552) |
| VH | EVQLVESGGGLVKPGGSLRLSCAASGFKFSNEWMSWVRQAPGKGLEWVGRIKSKTDGGTTDYAAPVKGRFTI |
| | SRDDSKNTLYLQMNSLKTEDTAVYYCTTDQDFWSGYYTGADYYGMDVWGQGTMVTVSS (SEQ ID |
| | NO: 1553) |
| VH | QMQLQQWGAGLLKPSETLSLTCVVYGGSLNGYYWSWIRQSPGKGLEWIGEIDHSGSTNYNPSLKNRVTMSVD |
| | TSKIQFSLKLTSVTVADTAVYYCAREGLLPFDYWGQGTLVTVSS (SEQ ID NO: 1554) |
| VH | QLQLQESGPDLVKPSDTLSLTCTVSDDSISSTTYYWAWIRQPPGKGLEWIGSMSYNGNNYYNPSLKSRVAIS |
| | AGTSQKQFSLKLTSVTAADTAVYHCARHLGYNGNWYPFDFWGQGILVTVSS (SEQ ID NO: 1555) |
| VH | EVQVVESGGGLVEPGRSLRLSCKASGFTFDDYAMHWVRQTPGKALEWVSGINWSGNNIGYADSVKGRFTISK |
| | DDAKNSLYLQMNSLRPEDTALYYCTKDISITGTLDAFDVWGQGTMVTVSS (SEQ ID NO: 1556) |
| VH | QVQLVESGGGVVQPGRSLRLSCAASGFTFSSYGMHWVRQAPGKGLEWVAIIWSDGDSEYNLDSVKGRFTISR |
| | DNSKNTLYLQMNSLRVEDSAVYYCARDRDLEDIWGQGTMVTSS (SEQ ID NO: 1557) |
| VH | EVQLLESGGVLVQPGGSLRLSCAASGFTFSNFGMTWVRQAPGKGLEWVSGISGGGRDTYFADSVKGRFTISR |
| | DNSKNTLYLQMNSLKGEDTAVYYCVKWGNIYFDYWGQGTLVTVSS (SEQ ID NO: 1558) |
| VH | EVQLVESGGGVVRPGGSLRLSCAASGFTFDDYGMSWVRQVPGKGLEWVSGISWNDGKTVYAESVKGRFIISR |
| | DNAKNSLYLEMNSLRAEDTALYYCARDWQYLIERYFDYWGQGTLVTVSS (SEQ ID NO: 1559) |
| VH | EVQLVESGGGVVRPGGSLRLSCTASGFTFDDYGMSWVRQAPGKGLEWISGIGWTGGRSSYADSVRGRFTISR |
| | DNAKNSLYLQMNSLGAEDTALYYCARDRQWLVQWYFDYWGQGTLVTVSS (SEQ ID NO: 1560) |
| VH | EVQLVESGGRVVRPGGSLRLSCAASGFTFDDYGMSWVRQLPGKGLEWVAGISWNDGKTVYAESVKGRFIISR |
| | DNAKNSLHLEMNSLRAEDTALYYCARDWQYLIDRYFDFWGQGTLVTVSS (SEQ ID NO: 1561) |
| VH | EVQLVESGGGLVQPGGSLRLSCAASGFTFDDYAMHWVRQAPGKGLEWVSGIGWSSGSIGYADSVKGRFTISR |
| | DNAKNSLYLQMDSLRPEDSALYYCAKAYTFMITLYFDYWGQGTLVTVSS (SEQ ID NO: 1562) |
| VH | EVQLVESGGGLVQPGRSLRLSCAASGFTFDDYDMHWVRQAPGKGLEWVSGSGWNRGSLGYADSVKGRFTISR |
| | DNAKKSLYLQMNSVRVEDTALYYCAKGFVVVSAAYFDYWGQGTLVTVSS (SEQ ID NO: 1563) |
| VH | QVQLVQSGAEVKRPGSSVKVSCKVSGVTFRNFAIIWVRQAPGQGLEWMGGIIPFFSAANYAQSFQGRVTITP |
| | DESTSTAFMELASLRSEDTAVYYCAREGERGHTYGFDYWGQGTLVTVSS (SEQ ID NO: 1564) |
| VH | EVQLVESGGGLVQSGRSLRLSCAASGFTFDDYAMHWVRQPPGKGLEWVSGINWNRGRTGYADSVKGRFTISR |
| | DNAKNSLYLQMNDLRVEDTALYYCAKAEQWLDEGYFDYWGQGTLVTVSS (SEQ ID NO: 1565) |
| VH | EVQLVESGGGLVQRGGSLRLSCAASGFSFSSYAMNWVRQAPGKGLEWVSTISDSGGSTYYADSVKGRFTISR |
| | DNSKNTLSLQMNSLRAEDTAVYYCAKDQGGSYPYYFHYWGQGTLVTVSS (SEQ ID NO: 1566) |
| VH | EVQLVESGGGLVQPGRSLRLSCAASGFTFEDYAMHWVRQAPGKGLEWVSGIGWSNVKIGYADSVKGRFTISR |
| | DNVRNSLYLQMNSLRTEDTAFYYCVKAYTSMLTLYFDYWGQGTLVTVSS (SEQ ID NO: 1567) |
| VH | QVQLVQSGAEVKRPGASVKVSCKASGYTFTSFYMYWVRQAPGQGLEWMGIINPSDGSTSNAQKFQGRVTMTR |
| | DTSTSTVYMELSSLRSEDTAVYYCARRVAGDIFDIWGQGTMTVSS (SEQ ID NO: 1568) |
| VH | QVQLQESGPGLVKPSETLSLTCTVSGGSISSYHWNWIRQSPGKGLEWIGYIYYIGSTDYNPSLESRVTISVD |
| | TSKNQFSLKLSSVTAADTAVYYCARVPVGATGASDVWGQGTMVTVSS (SEQ ID NO: 1569) |
| VH | EVQLVESGGSVVRPGGSLRLSCVVSGFTFEDYGLSWVRQIPGKGLEWVSGISWTGGNTGYADSVKGRFTISR |
| | DNAKNSLYLQMNSLRAEDTALYHCTRDRQWLMQWYFDYWGQGTLVTVSS (SEQ ID NO: 1570) |
| VH | QVQLVESGGGVVQPGRSLRLSCSASGFTFSAYAMHWVRQAPGKGLEWVAAISYGGSDKYYADSVKGRFTISR |
| | DNSKNTLYLQMNSLRTDDTAVYYCAKSAHWNFFFDYWGQGTLVTVSS (SEQ ID NO: 1571) |
| VH | EVQLVESGGGLVQPGRSLRLSCVASGFALHDYAMHWVRQVPGKGLEWVSSISWNSGVIGYADSLKGRFTISR |
| | DNAKNSLYLQMNSLRAEDTALYYCAKGSGSYYVSWFDPWGQGTLVTVSS (SEQ ID NO: 1572) |
| VH | QLQLQESGPGLVQPSETLSLTCTVSGDSISSTAYHWDWIRQPPGKGLEWIGTITYNGNTYFNPSLKSRVTIS |
| | VDTSKNQFSLKLLSMTAAETAVFYCARHLGYNSDFFPFDFWGQGTLVTVSS (SEQ ID NO: 1573) |
| VH | EVQLVESGGGLVRPGGSLRLSCAASGFTFSTYAMAWVRQTPGKGLEGVSAIGGSGDSTYYVDSVKGRFTISR |
| | DNSKSTLFLQMNSLRAEDTAVYYCVKVRNYDGSFDIWGQGTMVTVSS (SEQ ID NO: 1574) |
| VL | DIQMTQSPSSLSASVGDRVTITCRASQSISSYLIWYQQKPGTAPKFLIYAASSLQSGVPSRFSGCGSGTDFT |
| | LTISSLQPEDFATYYCQQSYSTPPITFGQGTRLEIK (SEQ ID NO: 1575) |
| VL | EIVMTQSPATLSVSPGERATLSCRASQSVSSNLAWYQQKPGQAPRLLIYGASTRATGIPARFSGSGSGTEFT |
| | LTISSLQSGDFAVYYCQQYNNWPLTFGGGTKVEIN (SEQ ID NO: 1576) |
| VL | EIVMTQSPATLSVSPGERATLSCRASQSVSSNLAWYQQKPGQAPRLLIYGASTRATGIPARFSGSGSGTEFT |
| | LTISSLQSGDFAVYYCQQYNNWPLTFGGGTKVEIN (SEQ ID NO: 1577) |
| VL | DIQMTQSPSSLSASVGDRVTITCRASQSINNYLNWYQQKPGKAPKLLIYTASSLQSGVPSRFSGSGSGTDFT |
| | LTISSLQPEDFATYYCQQSYSTPPLTFGQGTQLEIK (SEQ ID NO: 1578) |
| VL | DIQMTQSPSSLSASVGDRVTITCRASQSISNYLNWYQQKPGKAPKLLIYAASSLQSGVPSRFSGSGSGTDFT |
| | LTISSLQPEDFATYYCQQSYSTPPITFGQGTRLEIK (SEQ ID NO: 1579) |
| VL | DIQMTQSPSSLSASVGDRVTITCRASQSISSYLNWYQQKPGKAPKLLIYAASSLQSGVPSRFSGSGSGTDFT |
| | LTISSLQPEDFATYYCQQSYSTPPITFGQGTRLEIK (SEQ ID NO: 1580) |
| VL | EIVLTQSPGTLSLSPGERVTLSCRASQSVYSNYLAWYQQNPGQAPRLLIYAASNRATGIPDRFSGSGSGTDF |
| | TLTISRLEPEDFAVYYCHQYATSPWTFGQGTKVEIK (SEQ ID NO: 1581) |
| VL | EIVLTQSPGTLSLSPGERATLSCRASQSVSSSYLAWYQQKPGQAPRLLIYGASSRTTGIPDRFSGSGSGTDF |
| | TLTISRLEPEDFAVYYCQQYGSSPWTFGQGTKVEIK (SEQ ID NO: 1582) |
| VL | DIQMTQSPISVSASVGDRVTITCRASQGISNWLAWYQQKPGIAPKLLIYSASSLQSGVPSRFRGSGSGTDFT |
| | LTIGSLQPEDFATYYCQQAHSFPLTFGGGTKVEIK (SEQ ID NO: 1583) |
| VL | DIQMTQSPSSLSASVGDRVTITCRASQGIRNDLGWYQQKPGKAPKRLIYAASNLQSGVPSRFSGSGSGTEFT |
| | LTISSLQPEDFATYYCLQHNSYPLTFGGGTKVEIK (SEQ ID NO: 1584) |
| VL | DIQMTQSPSSLSASVGDSITITCRASLSINTFLNWYQQKPGKAPNLLIYAASSLHGGVPSRFSGSGSGTDFT |
| | LTIRTLQPEDFATYYCQQSSNTPFTFGPGTVVDFR (SEQ ID NO: 1585) |
| VL | EIVLTQSPGTLSLSPGERATLSCRASQSVSSSYLAWYQQKPGQAPRLLIYGASSRATGIPDRFSGSGSGTDF |
| | TLTISRLEPEDFAVYYCQQYGSSPWTFGQGTKVEIK (SEQ ID NO: 1586) |
| VL | DIQMTQSPSSLSASVGDRVTITCRASQSISSYLNWYQQKPGKAPKLLIYAASSLQSGVPSRFSGSGSGTDFT |
| | LTISSLQPEDFATYYCQQSYSTPPITFGQGTRLEIK (SEQ ID NO: 1587) |
| HC | EVQLLESGGVLVQPGGSLRLSCAASGFTFSNFGMTWVRQAPGKGLEWVSGISGGGRDTYFADSVKGRFTISR |
| | DNSKNTLYLQMNSLKGEDTAVYYCVKWGNIYFDYWGQGTLVTVSSASTKGPSVFPLAPCSRSTSESTAALGC |
| | LVKDYFPEPVTVSWNSGALTSGVHTFPAVLQSSGLYSLSSVVTVPSSSLGTKTYTCNVDHKPSNTKVDKRVE |
| | SKYGPPCPPCPAPEFLGGPSVFLFPPKPKDTLMISRTPEVTCVVVDVSQEDPEVQFNWYVDGVEVHNAKTKP |
| | REEQFNSTYRVVSVLTVLHQDWLNGKEYKCKVSNKGLPSSIEKTISKAKGQPREPQVYTLPPSQEEMTKNQV |
| | SLTCLVKGFYPSDIAVEWESNGQPENNYKTTPPVLDSDGSFFLYSRLTVDKSRWQEGNVFSCSVMHEALHNH |
| | YTQKSLSLSLGK (SEQ ID NO: 1588) |
| HC | EVQVVESGGGLVEPGRSLRLSCKASGFTFDDYAMHWVRQTPGKALEWVSGISWSGNNIGYADSVKGRFTISK |
| | DDAKNSLYLQMNSLRPEDTALYYCTKDISITGTLDAFDVWGQGTMVTVSSASTKGPSVFPLAPCSRSTSEST |
| | AALGCLVKDYFPEPVTVSWNSGALTSGVHTFPAVLQSSGLYSLSSVVTVPSSSLGTKTYTCNVDHKPSNTKV |
| | DKRVESKYGPPCPPCPAPEFLGGPSVFLFPPKPKDTLMISRTPEVTCVVVDVSQEDPEVQFNWYVDGVEVHN |
| | AKTKPREEQFNSTYRVVSVLTVLHQDWLNGKEYKCKVSNKGLPSSIEKTISKAKGQPREPQVYTLPPSQEEM |
| | TKNQVSLTCLVKGFYPSDIAVEWESNGQPENNYKTTPPVLDSDGSFFLYSRLTVDKSRWQEGNVFSCSVMHE |
| | ALHNHYTQKSLSLSLGK (SEQ ID NO: 1589) |
| HC | EVQLVESGGGLVRPGGSLRLSCAASGFTFSTYAMAWVRQTPGKGLEGVSAIGGSGDSTYYVDSVKGRFTISR |
| | DNSKSTLFLQMNSLRAEDTAVYYCVKVRNYDGSFDIWGQGTMVTVSSASTKGPSVFPLAPCSRSTSESTAAL |
| | GCLVKDYFPEPVTVSWNSGALTSGVHTFPAVLQSSGLYSLSSVVTVPSSSLGTKTYTCNVDHKPSNTKVDKR |
| | VESKYGPPCPPCPAPEFLGGPSVFLFPPKPKDTLMISRTPEVTCVVVDVSQEDPEVQFNWYVDGVEVHNAKT |
| | KPREEQFNSTYRVVSVLTVLHQDWLNGKEYKCKVSNKGLPSSIEKTISKAKGQPREPQVYTLPPSQEEMTKN |
| | QVSLTCLVKGFYPSDIAVEWESNGQPENNYKTTPPVLDSDGSFFLYSRLTVDKSRWQEGNVFSCSVMHEALH |
| | NHYTQKSLSLSLGK (SEQ ID NO: 1590) |
| HC | QVQLVQSGAEVKRPGSSVKVSCKVSGVTFRNFAIIWVRQAPGQGLEWMGGIIPFFSAANYAQSFQGRVTITP |
| | DESTSTAFMELASLRSEDTAVYYCAREGERGHTYGFDYWGQGTLVTVSSASTKGPSVFPLAPCSRSTSESTA |
| | ALGCLVKDYFPEPVTVSWNSGALTSGVHTFPAVLQSSGLYSLSSVVTVPSSSLGTKTYTCNVDHKPSNTKVD |
| | KRVESKYGPPCPPCPAPEFLGGPSVFLFPPKPKDTLMISRTPEVTCVVVDVSQEDPEVQFNWYVDGVEVHNA |
| | KTKPREEQFNSTYRVVSVLTVLHQDWLNGKEYKCKVSNKGLPSSIEKTISKAKGQPREPQVYTLPPSQEEMT |
| | KNQVSLTCLVKGFYPSDIAVEWESNGQPENNYKTTPPVLDSDGSFFLYSRLTVDKSRWQEGNVFSCSVMHEA |
| | LHNHYTQKSLSLSLGK (SEQ ID NO: 1591) |
| LC | DIQMTQSPSSLSASVGDSITITCRASLSINTFLNWYQQKPGKAPNLLIYAASSLHGGVPSRFSGSGSGTDFT |
| | LTIRTLQPEDFATYYCQQSSNTPFTFGPGTVVDFRRTVAAPSVFIFPPSDEQLKSGTASVVCLLNNFYPREA |
| | KVQWKVDNALQSGNSQESVTEQDSKDSTYSLSSTLTLSKADYEKHKVYACEVTHQGLSSPVTKSFNRGEC |
| | (SEQ ID NO: 1592) |
| LC | DIQMTQSPISVSASVGDRVTITCRASQGISNWLAWYQQKPGIAPKLLIYSASSLQSGVPSRFRGSGSGTDFT |
| | LTIGSLQPEDFATYYCQQAHSFPLTFGGGTKVEIKRTVAAPSVFIFPPSDEQLKSGTASVVCLLNNFYPREA |
| | KVQWKVDNALQSGNSQESVTEQDSKDSTYSLSSTLTLSKADYEKHKVYACEVTHQGLSSPVTKSFNRGEC |
| | (SEQ ID NO: 1593) |
| LC | EIVLTQSPGTLSLSPGERATLSCRASQSVSSSYLAWYQQKPGQAPRLLIYGASSRATGIPDRFSGSGSGTDF |
| | TLTISRLEPEDFAVYYCQQYGSSPWTFGQGTKVEIKRTVAAPSVFIFPPSDEQLKSGTASVVCLLNNFYPRE |
| | AKVQWKVDNALQSGNSQESVTEQDSKDSTYSLSSTLTLSKADYEKHKVYACEVTHQGLSSPVTKSFNRGEC |
| | (SEQ ID NO: 1594) |
| LC | DIQMTQSPSSLSASVGDRVTITCRASQSISSYLNWYQQKPGKAPKLLIYAASSLQSGVPSRFSGSGSGTDFT |
| | LTISSLQPEDFATYYCQQSYSTPPITFGQGTRLEIKRTVAAPSVFIFPPSDEQLKSGTASVVCLLNNFYPRE |
| | AKVQWKVDNALQSGNSQESVTEQDSKDSTYSLSSTLTLSKADYEKHKVYACEVTHQGLSSPVTKSFNRGEC |
| | (SEQ ID NO: 1595) |

Group R

| | |
|---|---|
| VH | EVKLVESGGGLVKPGGSLKLSCAASGFTFSSYGMSWLRQTPEKRLEWVATMSGGGRDIYYPDSMKGRFTISR |
| | DNAKNNLYLQMSSLRSEDTALYYCARQYYDDWFAYWGQGTLVTVSA (SEQ ID NO: 1719) |
| VH | QVQLKQSGPGLVQPSQNLSVTCTVSGFSLTTYGVHWVRQSPGKGLEWLGVIWSGGSTDYNAAFISRLTISKD |
| | NARSQVFFKMNSLQVNDTAMYYCAREKSVYGNYVGAMDYWGQGTSVTVSS (SEQ ID NO: 1720) |
| VH | EVKLVESGGGLVKPGGSLKLSCGASGFTFSSYGMSWVRQTPEKRLEWVATISGGGRDIYYPDSVKGRLTISR |
| | DNAKNNLYLQMSSLRSEDTALYYCVRQYYDDWFAYWGQGTLVTVSA (SEQ ID NO: 1721) |
| VH | DVQLQESGPGLVKPSQSLSLTCTVTGYSITSDYAWNWIRQFPGNQLEWMAYISYSGYTSYNPSLKSRISITR |
| | DTSKNQFFLQLNSVTTEDTATYYCARSLDYDYGTMDYWGQGTSVTVSS (SEQ ID NO: 1722) |
| VH | EVKLVESGGGLVKPGGSLKLSCAASGFAFRSYDMSWVRQTPEKILEWVATISGGGSYTYYQDSVKGRFTISR |
| | DNARNTLYLQMSSLRSEDTALYYCASPYGPYFDYWGQGTTLTVSS (SEQ ID NO: 1723) |
| VH | DVQLQESGPGLVKPSQSLSLTCTVTGYSITSDYAWNWIRQFPGNQLEWMAYISYSGYTSYNPSLKSRISITR |
| | DTSRNQFFLQLNSVTTEDTATYYCARSLDYDYGTMDYWGQGTSVTVSS (SEQ ID NO: 1724) |
| VH | EVKLVESGGGLVKPGGSLKLSCSASGFSFSYYDMSWVRQTPEKGLEWVATISGGGRNTYFIDSVKGRFTISR |
| | DNVKNNLYLLMSSLRSEDTALYYCASPYEGAVDFWGQGTSVTVSS (SEQ ID NO: 1725) |
| VH | EVKLVESGGGLVKPGGSLKLSCAASGFTFSSYGMSWVRQTPEKRLEWATISGGGRDTYYLDSVKGRFTISRD |
| | NAKNNLYLQMSSLRSEDTALYYCVRQYYDDWFAYWGQGTLVSNSA (SEQ ID NO: 1726) |
| VH | QVQLQQSGDELVRPGTSVKMSCKAAGYTFTNNWIGWVKQRPGHGLEWIGDFYPGGGYTNYNEKFKGKATLTA |
| | DTSSSTAYMQLSSLTSEDSAIYYCARGYGTNYWYFDVWGAGTTVTVSS (SEQ ID NO: 1727) |
| VH | QIHLVQSGPELKKPGETVKISCKASGYTFTNFGMNWVKQAPGKGLKWMGWISGYTREPTYAADFKGRFAISL |
| | ETSASTAYLQINDLKNEDMATYFCARDVFDYWGQGTTLTVSS (SEQ ID NO: 1728) |
| VH | QIQLVQSGSELKKPGASVKVSCKASGYTFTNFGMNWVRQAPGQGLKWMGWISGYTREPTYAADFKGRFVISL |
| | DTSVSTAYLQISSLKAEDTAVYYCARDVFDYWGQGTLVTVSS (SEQ ID NO: 1729) |
| VH | QVQLQESGPGLVKPSQTLSLTCTVSGYSISSDYAWNWIRQPPGKGLEWMAYISYSGYTSYNPSLKSRITISR |
| | DTSKNQFSLKLSSVTAADTAVYYCARSLDYDYGTMDYWGQGTLVTVSS (SEQ ID NO: 1730) |
| VL | DIVLTQTPATLSVTPGDSVSLSCRASQSISNNLHWYQQKSHESPRLLIKYASQSISGIPSRFSGSGSGTDFT |
| | LNINSVETEDFGMYFCQQSNSWPLTFGAGTKLELKR (SEQ ID NO: 1731) |
| VL | SIVMTQTPKFLLVSAGDRVTITCKASQSVSDDVAWYQQKPGQSPKLLIYYAFNRYTGVPDRFTGSGYGTDFT |
| | FTISTVQSEDLAVYFCQQDYRSPWTFGGGTKLEIKR (SEQ ID NO: 1732) |
| VL | DIVLTQSPATLSVTPGDSVSLSCRASQSISNDLHWYQQKSHESPRLLIKYVSQSISGIPSRFSGSGSGTDFT |
| | LSINSVETEDFGMYFCQQSDSWPLTFGAGTKLELKR (SEQ ID NO: 1733) |
| VL | QIVLSQSPAILSASPGEKVTMTCRANSSVSSMHWYQQKPGSSPEPWIYAISNLAFGVPTRFSGSGSGTSYSL |
| | TISRVEAEDAATYFCQQWSSRPPTFGGGTKLEIKR (SEQ ID NO: 1734) |
| VL | DIQMNQSPSSLSASLGDTITITCHASQSINVWLSWYQQKPGNIPKLLIYRASNLHTGVPSRFSGSGSGTGFT |
| | LTISSLQPDDIATYYCQQGQSYPWTFGGGTKLEIKR (SEQ ID NO: 1735) |
| VL | QIVLSQSPAILSASPGEKVTMTCRANSSVSSMHWYQQKPGSSPEPWIYAISNLAFGVPARFSGSGSGTSYSL |
| | TISRVEAEDAATYFCQQWNSRPPTFGGGTKLEIKR (SEQ ID NO: 1736) |
| VL | DIVMTQSHKVMSTSVGDRVSITCKASQDVDNAVAWYQQNPGQSPKLLIKWASTRHHGVPDRFTGSGSGTDFT |
| | LTISTVQSEDLADFFCQQYSTFPYTFGGGTKLEIKR (SEQ ID NO: 1737) |
| VL | DIVLTQTPATLSVTPGDSVSLSCRASQSLSNNLHWYQQKSHESPRLLIKYASQSISGIPSRFSGSGSGTDFT |
| | LSINSVETEDFGMYFCQQSNSWPLTFGAGTKLEMKR (SEQ ID NO: 1738) |
| VL | NIVMTQTPKILFISAGDRVTITCKASQSVSNDVAWYQQKPGQSPKLLIYYAFTRYIGVPDRFTGSGYGTDFT |
| | FTISTVQAEDLAVYFCQQDYSSPYTFGGGTKLEIKR (SEQ ID NO: 1739) |
| VL | DIVLTQSPASLAVSLGQRATISCRASESVDNYGYSFMNWFQQKPGQPPKLLIYRASNLESGIPARFSGSGSR |
| | TNFTLTINPVEADDVATYFCQQSNADPTFGGGTNLEIKR (SEQ ID NO: 1740) |
| VL | DIVLTQSPASLAVSPGQRATITCRASESVDNYGYSFMNWFQQKPGQPPKLLIYRASNLESGVPARFSGSGSR |
| | TDFTLTINPVEANDTANYYCQQSNADPTFGQGTKLEIK (SEQ ID NO: 1741) |
| VL | EIVLTQSPATLSLSPGERATLSCRANSSVSSMHWYQQKPGQSPEPWIYAISNLAFGVPARFSGSGSGTDYTL |
| | TISSLEPEDFAVYYCQQWSSRPPTFGQGTKLEIK (SEQ ID NO: 1742) |

Group S

| | |
|---|---|
| VH | QVQLVQSGSEVKKSGSSVKVSCKTSGGTFSITNYAINWVRQAPGQGLEWMGGILPIFGAAKYAQKFQDRVTI |
| | TADESTNTAYLELSSLTSEDTAMYYCARGKRWLQSDLQYWGQGTLVTVSS (SEQ ID NO: 1743) |
| VL | QPVLTQPASVSGSPGQSITISCTGSSSDVGSYDLVSWYQQSPGKVPKLLIYEGVKRPSGVSNRFSGSKSGNT |
| | ASLTISGLQAEDEADYYCSSYAGTRNFVFGGGTQLTVL (SEQ ID NO: 1744) |

Group T

| | |
|---|---|
| VH | QVQLVQSGAEVKKPGASVKVSCKASGYTFTNYYMYWVKQAPGQGLEWIGGINPSNGGTNYNEKFKNKATLTA |
| | DKSTSTAYMELSSLRSEDTAVYYCTRRDYRYDMGFDYWGQGTTVTVSS (SEQ ID NO: 1745) |
| VH | QVQLVQSGAEVKKPGASVKVSCKASGYTFTSYYMYWVRQAPGQGLEWMGGVNPSNGGTNFNEKFKSRVTITA |
| | DKSTSTAYMELSSLRSEDTAVYYCARRDYRYDMGFDYWGQGTTVTVSS (SEQ ID NO: 1746) |
| VH | EVQLQQSGPELVKPGASVKISCKASGYTFTNYYMYWVKQSHGKSLEWIGGINPSNGGTNYNEKFKNKATLTV |
| | DKSSSTAYMELNSLTSEDSAVYYCARRDYRYDMGFDYWGAGTTVTVSS (SEQ ID NO: 1747) |
| VH | EVQLQQSGPVLVKPGASVKMSCKASGYTFTSYYMYWVKQSHGKSLEWIGGVNPSNGGTNFNEKFKSKATLTV |
| | DKSSSTAYMELNSLTSEDSAVYYCARRDYRYDMGFDYWGQGTTLTVSS (SEQ ID NO: 1748) |
| VL | EIVLTQSPATLSLSPGERATISCRASKGVSTSGYSYLHWYQQKPGQAPRLLIYLASYLESGVPARFSGSGSG |
| | TDFTLTISSLEPEDFATYYCQHSRELPLTFGTGTKVEIK (SEQ ID NO: 1749) |
| VL | QIVLTQSPAIMSASPGEKVTMTCRASKGVSTSGYSYLHWYQQKPGSSPRLLIYLASYLESGVPVRFSGSGSG |
| | TSYSLTISRMEAEDAATYYCQHSRELPLTFGTGTRLEIK (SEQ ID NO: 1750) |

Group U

| | |
|---|---|
| VH | QVQLQQSGAELMKPGASVKMSCKTTGYIFSSYWIGWVKQRPGHGLEWIGKIFPGSGSADYNENFKGKATFTV |
| | DTSSNTAYMQLSSLTSEDSAVYYCARGYGNYLYFDVWGAGTTVTVSS (SEQ ID NO: 619) |
| VH | DVQLQESGPGLVKPSQSLSLTCTVTGHSITSDYAWNWIRQFPGNKLEWMGYISYSGRTSYNPSLTSRISITR |
| | DTSKNQFFLQLNSVTTEDTATYYCARGYALDYWGQGTSVTVSS (SEQ ID NO: 1835) |
| VH | EVKLVESGGGLVSPGGSLKLSCAASGFTFSTFGMSWVRQTPEKRLEWVATISGGGSDTYYPDSVQGRFIISR |
| | YNAKNNLYLQMNSLRPEDTALYYCARQGYDVYSWFAYWGQGTLVTVSA (SEQ ID NO: 1836) |
| VH | EVKLVESGGGLVKPGGSLKLSCAASGFTFSTYGMSWVRQTPEKRLQWVATISGGGSNTYYSDSVKGRFTISR |
| | DNAKNNLYLQMSSLRSEDTALYYCARQRDSAWFASWGQGTLVTVSA (SEQ ID NO: 1837) |
| VH | EVQLVESGGGLVKPGGSLRLSCAASGFTFSTFGMSWVRQAPGKGLEWVSTISGGGSDTYYPDSVQGRFTISR |
| | DNAKNSLYLQMNSLRAEDTAVYYCARQGYDVYSWFAYWGQGTLVTVSS (SEQ ID NO: 1838) |
| VH | EVQLVESGGGLVQPGGSLRLSCAASGFTFSTFGMSWVRQAPGKGLEWVATISGGGSDTYYPDSVQGRFTISR |
| | DNAKNSLYLQMNSLRAEDTAVYYCARQGYDVYSWFAYWGQGTLVTVSS (SEQ ID NO: 1839) |
| VH | EVQLVESGGGLVKPGGSLRLSCAASGFTFSTYGMSWVRQAPGKGLEWVATISGGGSNTYYSDSVKGRFTISR |
| | DDSKNTLYLQMNSLKTEDTAVYYCARQRDSAWFASWGQGTLVTVSS (SEQ ID NO: 1840) |
| VH | EVQLVQSGAEVKKPGASVKVSCKASGYRFPHYGISWVRQAPGQGLEWMGWISAYNGNTNYAQKLQGRVTMTT |
| | DTSTNTAYMELRSLRSDDTAVYYCARDVDYGTGSGYWGQGTLVTVSS (SEQ ID NO: 1841) |
| VH | EVQLVQSGAEVKKPGASVKVSCKASGYRFTRQGISWVRQAPGQGLEWMGWISAYNGNTKYAQKLQGRVTMTT |
| | DTSTNTAYMELRSLRSDDTAVYYCARDVDYGSGSGYWGQGTLVTVSS (SEQ ID NO: 1842) |
| VH | EVQLVQSGAEVKKPGASVKVSCKASGYRFSTFGISWVRQAPGQGLEWMGWISAYNGNTNYAQKLQGRVTMTT |
| | DTSTNTAYMELRSLRSDDTAVYYCARDVDYSSGSGYWGQGTLVTVSS (SEQ ID NO: 1843) |
| VH | EVQLVQSGAEVKKPGASVKVSCKASGYRFTRYGISWVRQAPGQGLEWMGWVSAHNGNTNYAQKLQGRVTMTT |
| | DTSTNTAYMELRSLRSDDTAVYYCARDADYGSGSGYWGQGTLVTVSS (SEQ ID NO: 1844) |
| VH | EVQLVQSGAEVKKPGASVKVSCKASGYRFPHYGISWVRQAPGQGLEWMGWISAYNGNTNYAQKLQGRVTMTT |
| | DTSTNTAYMELRSLRSDDTAVYYCARDAEYGSGSGYWGQGTLVTVSS (SEQ ID NO: 1845) |
| VH | EVQLVQSGAEVKKPGASVKVSCKASGYRFTWYGISWVRQAPGQGLEWMGWISAYNGNTNYAQKLQGRVTMTT |
| | DTSTNTAYMELRSLRSDDTAVYYCARDSEYSSGSGYWGQGTLVTVSS (SEQ ID NO: 1846) |
| VH | EVQLVQSGAEVKKPGASVKVSCKASGYRFETYGISWVRQAPGQGLEWMGWISAYNGNTNYAQKLQGRVTMTT |
| | DTSTNTAYMELRSLRSDDTAVYYCARDAEYSLGSGYWGQGTLVTVSS (SEQ ID NO: 1847) |
| VH | EVQLVQSGAEVKKPGASVKVSCKASGYRFRQYGISWVRQAPGQGLEWMGWISAYNGNTNYAQKLQGRVTMTT |
| | DTSTNTAYMELRSLRSDDTAVYYCARDAEYGSGSGYWGQGTLVTVSS (SEQ ID NO: 1848) |
| VH | EVQLVQSGAEVKKPGASVKVSCKASGYRFTWYGISWVRQAPGQGLEWMGWISAYNGNTNYAQKLQGRVTMTT |
| | DTSTNTAYMELRSLRSDDTAVYYCARDSEYRSGSGYWGQGTLVTVSS (SEQ ID NO: 1849) |
| VH | EVQLVQSGAEVKKPGASVKVSCKASGYRFRQYGISWVRQAPGQGLEWMGWISAYNGNTNYAQKLQGRVTMTT |
| | DTSTNTAYMELRSLRSDDTAVYYCARDAEYRSGSGYWGQGTLVTVSS (SEQ ID NO: 1850) |
| VH | EVQLVQSGAEVKKPGASVKVSCKASGYRFTRYGISWVRQAPGQGLEWMGWVSAHNGNTNYAQKLQGRVTMTT |
| | DTSTNTAYMELRSLRSDDTAVYYCARDADYRSGSGYWGQGTLVTVSSS (SEQ ID NO: 1851) |
| VH | EVQLVQSGAEVKKPGASVKVSCKASGYRFPHYGISWVRQAPGQGLEWMGWISAYNGNTNYAQKLQGRVTMTT |
| | DTSTNTAYMELRSLRSDDTAVYYCARDVDYRTGSGYWGQGTLVTVSS (SEQ ID NO: 1852) |
| VH | EVQLVQSGAEVKKPGASVKVSCKASGYRFSTFGISWVRQAPGQGLEWMGWISAYNGNTNYAQKLQGRVTMTT |
| | DTSTNTAYMELRSLRSDDTAVYYCARDVDYRSGSGYWGQGTLVTVSS (SEQ ID NO: 1853) |
| VH | EVQLVQSGAEVKKPGASVKVSCKASGYRFTRQGISWVRQAPGQGLEWMGWISAYNGNTKYAQKLQGRVTMTT |
| | DTSTNTAYMELRSLRSDDTAVYYCARDVDYRSGSGYWGQGTLVTVSS (SEQ ID NO: 1854) |
| VH | EVQLVQSGAEVKKPGASVKVSCKASGYRFPHYGISWVRQAPGQGLEWMGWISAYNGNTNYAQKLQGRVTMTT |
| | DTSTNTAYMELRSLRSDDTAVYYCARDAEYRSGSGYWGQGTLVTVSS (SEQ ID NO: 1855) |
| VH | EVQLVQSGAEVKKPGASVKVSCKASGYRFETYGISWVRQAPGQGLEWMGWISAYNGNTNYAQKLQGRVTMTT |
| | DTSTNTAYMELRSLRSDDTAVYYCARDAEYRLGSGYWGQGTLVTVSS (SEQ ID NO: 1869) |
| VL | NIVMTQTPKFLLVSAGDRITITCKASQSVSDDVAWYQQKPGQSPKLLISYAFKRYIGVPDRFTGSGYGTDFT |
| | FTISTVQAEDLAVYFCQQNYNSPYTFGGGTKLELKR (SEQ ID NO: 1856) |
| VL | QIVLSQSPAILSASPGEKVTMTCRTSSSVNYMHWFQQKPGSSPKPWIYATSKLASGVPARFSGSGSGTSYSL |
| | TISRVEAEDAATYFCQQWISDPWTFGGGTKLEIK (SEQ ID NO: 1857) |
| VL | SYELTQPPSVSVSPGQTARITCSGDALTTQYAYWYQQKPGQAPVMVIYKDTERPSGIPERFSGSSSGTKVTL |
| | TISGVQAEDEADYYCQSADNSITYRVFGGGTKVTVL (SEQ ID NO: 1858) |
| VL | SYELTQPPSVSVSPGQTARITCSGDALSEQYAYWYQQKPGQAPVMVIYKDTERPSGIPERFSGSSSGTKVTL |
| | TISGVQAEDEADYYCQSADNSITYRVFGGGTKVTVL (SEQ ID NO: 1859) |
| VL | SYELTQPPSVSVSPGQTARITCSGDALPKQYAYWYQQKPGQAPVMVIYKDTERPSGIPERFSGSSSGTKVTL |
| | TISGVQAEDEADYYCQSADNSITYRVFGGGTKVTVL (SEQ ID NO: 737) |
| VL | SYELTQPPSVSVSPGQTARITCSGDALPMQYGYWYQQKPGQAPVMVLYKDTERPSGIPERFSGSSSGTKVTL |
| | TISGVQAEDEDYYCQSDNSITYRVFGGGTKVTVL (SEQ ID NO: 1860) |
| VL | SYELTQPPSVSVSPGQTARITCSGDALPMQYGYWYQQKPGQAPVMVIYKDTERPSGIPERFSGSSSGTKVTL |
| | TISGVQAEDEADYYCQSADNSITYRVFGGGTKVTVL (SEQ ID NO: 1861) |
| VL | DIILTQSPASLAVSLGQRAAISCRASESVDNSGISFMSWFQQKPGQPPKLLIYTASNQGSGVPARFSGSGSG |
| | TEFSLNIHPMEEDDTAMYFCQQSKEVPWTFGGGTKLEIR (SEQ ID NO: 1862) |
| VL | DIVLTQSPASLAVSLGQRATISCRASENVDDYGVSFMNWFQQKPGQPPKLLIYPASNQGSGVPARFSGSGSG |
| | TDFSLNIHPMEEDDTAMYFCQQSKEVPWTFGGGTKLEIK (SEQ ID NO: 1863) |
| VL | DIQLTQSPSFLSASVGDRVTITCRASESVDNSGISFMSWYQQKPGKAPKLLIYTASNQGSGVPSRFSGSGSG |
| | TEFTLTISSLQPEDFATYYCQQSKEVPWTFGQGTKVEIK (SEQ ID NO: 1864) |
| VL | EIVLTQSPATLSLSPGERATLSCRASESVDNSGISFMSWYQQKPGQAPRLLIYTASNQGSGIPARFSGSGSG |
| | TDFTLTISSLEPEDFAVYYCQQSKEVPWTFGQGTKVEIK (SEQ ID NO: 1865) |
| VL | EIVLTQSPATLSLSPGERATLSCRASENVDDYGVSFMNWYQQKPGQAPRLLIYPASNQGSGIPARFSGSGSG |
| | TDFTLTISSLEPEDFAVYYCQQSKEVPWTFGQGTKVEIK (SEQ ID NO: 1866) |
| VL | EIVLTQSPGTLSLSPGERATLSCRASENVDDYGVSFMNWYQQKPGQAPRLLIYPASNQGSGIPDRFSGSGSG |
| | TDFTLTISRLEPEDFAVYYCQQSKEVPWTFGQGTKVEIK (SEQ ID NO: 1867) |
| VL | DIVMTQSPDSLAVSLGERATINCRASENVDDYGVSFMNWYQQKPGQPPKLLIYPASNQGSGVPDRFSGSGSG |
| | TDFTLTISSLQAEDVAVYYCQQSKEVPWTFGGGTKLEIK (SEQ ID NO: 1868) |

Group V

| | |
|---|---|
| VH | QVQLVQSGAEVKKPGASVKVSCKASGYTFTSYWINWVRQAPGQGLEWMGNIYPGSSLTNYNEKFKNRVTMTR |
| | DTSTSTVYMELSSLRSEDTAVYYCARLLTGTFAYWGQGTLVTVSS (SEQ ID NO: 1870) |
| VH | QVQLVQSGAEVKKPGASVKVSCKASGYTFTSYWINWVRQAPGQGLEWMGNIYPGSSLTNYNEKFKNRVTMTR |
| | DTSTSTVYMELSSLRSEDTAVYYCARLSTGTFAYWGQGTLVTVSS (SEQ ID NO: 1871) |
| VH | QVQLVQSGAEVKKPGASVKVSCKASGYTFTSYWINWVRQAPGQGLEWMGNIYPGSSITNYNEKFKNRVTMTR |
| | DTSTSTVYMELSSLRSEDTAVYYCARLTTGTFAYWGQGTLVTVSS (SEQ ID NO: 1872) |
| VH | QVQLVQSGAEVKKPGASVKVSCKASGYTFTSYWINWVRQAPGQGLEWMGNIWPGSSLTNYNEKFKNRVTMTR |
| | DTSTSTVYMELSSLRSEDTAVYYCARLLTGTFAYWGQGTLVTVSS (SEQ ID NO: 1873) |
| VH | DIVMTQSPDSLAVSLGERATINCKSSQSLWDSGNQKNFLTWYQQKPGQPPKLLIYWTSTRESGVPDRFSGSG |
| | SGTDFTLTISSLQAEDVAVYYCQNDYFYPLTFGGGTKVEIK (SEQ ID NO: 1874) |
| VL | DIVMTQSPDSLAVSLGERATINCKSSQSLWDSGNQKNFLTWYQQKPGQPPKLLIYWTSYRESGVPDRFSGSG |
| | SGTDFTLTISSLQAEDVAVYYCQNDYFYPLTFGGGTKVEIK (SEQ ID NO: 1875) |
| VL | DIVMTQSPDSLAVSLGERATINCKSSQSLWDSGNQKNFLTWYQQKPGQPPKLLIYWTSYRESGVPDRFSGSG |
| | SGTDFTLTISSLQAEDVAVYYCQNDYFYPHTFGGGTKVEIK (SEQ ID NO: 1876) |
| VL | DIVMTQSPDSLAVSLGERATINCKSSQSLWDSTNQKNFLTWYQQKPGQPPKLLIYWTSTRESGVPDRFSGSG |
| | SGTDFTLTISSLQAEDVAVYYCQNDYFYPLTFGGGTKVEIK (SEQ ID NO: 1877) |
| HC | QVQLVQSGAEVKKPGASVKVSCKASGYTFTSYWINWVRQAPGQGLEWMGNIYPGSSLTNYNEKFKNRVTMTR |
| | DTSTSTVYMELSSLRSEDTAVYYCARLSTGTFAYWGQGTLVTVSSASTKGPSVFPLAPCSRSTSESTAALGC |
| | LVKDYFPEPVTVSWNSGALTSGVHTFPAVLQSSGLYSLSSVVTVPSSSLGTKTYTCNVDHKPSNTKVDKRVE |
| | SKYGPPCPPCPAPEFLGGPSVFLFPPKPKDTLMISRTPEVTCVVVDVSQEDPEVQFNWYVDGVEVHNAKTKP |
| | REEQFNSTYRVVSVLTVLHQDWLNGKEYKCKVSNKGLPSSIEKTISKAKGQPREPQVYTLPPSQEEMTKNQV |
| | SLTCLVKGFYPSDIAVEWESNGQPENNYKTTPPVLDSDGSFFLYSRLTVDKSRWQEGNVFSCSVMHEALHNH |
| | YTQKSLSLSLGK (SEQ ID NO: 1878) |
| HC | QVQLVQSGAEVKKPGASVKVSCKASGYTFTSYWINWVRQAPGQGLEWMGNIYPGSSLTNYNEKFKNRVTMTR |
| | DTSTSTVYMELSSLRSEDTAVYYCARLSTGTFAYWGQGTLVTVSSASTKGPSVFPLAPCSRSTSESTAALGC |
| | LVKDYFPEPVTVSWNSGALTSGVHTFPAVLQSSGLYSLSSVVTVPSSSLGTKTYTCNVDHKPSNTKVDKRVE |
| | SKYGPPCPPCPAPEFLGGPSVFLFPPKPKDTLMISRTPEVTCVVVDVSQEDPEVQFNWYVDGVEVHNAKTKP |
| | REEQFNSTYRVVSVLTVLHQDWLNGKEYKCKVSNKGLPSSIEKTISKAKGQPREPQVYTLPPSQEEMTKNQV |
| | SLTCLVKGFYPSDIAVEWESNGQPENNYKTTPPVLDSDGSFFLYSRLTVDKSRWQEGNVFSCSVMHEALHNH |
| | YTQKSLSLSLG (SEQ ID NO: 1879) |
| LC | DIVMTQSPDSLAVSLGERATINCKSSQSLWDSGNQKNFLTWYQQKPGQPPKLLIYWTSYRESGVPDRFSGSG |
| | SGTDFTLTISSLQAEDVAVYYCQNDYFYPHTFGGGTKVEIKRGTVAAPSVFIFPPSDEQLKSGTASVVCLLN |
| | NFYPREAKVQWKVDNALQSGNSQESVTEQDSKDSTYSLSSTLTLSKADYEKHKVYACEVTHQGLSSPVTKSF |
| | NRGEC (SEQ ID NO: 1880) |

Group W

| | |
|---|---|
| VH | EVQLQESGPELVRPGASVKMSCKASGYTFTSYWMHWVKQRPGQGLEWIGMIDPSNSETSLNQKFKDKATLNV |
| | DKSTNTAYMQLSSLTSEDSAVYYCARSRGNYAYEMDYWGQGTSVTVSS (SEQ ID NO: 1972) |
| VH | EVQLQESGPELVRPGASVKMSCKASGYTFTSYWMHWVKQRPGQGLEWIGMIEPSSSETSLNQKFKDKATLNV |
| | DKSSNTAYMQLSSLTSEDSAVYYCARSRGNYAYEMDYWGQGTSVTVSS (SEQ ID NO: 1973) |
| VH | EVQLQESGPELVRPGASVKMSCKASGYTFTSYWMHWVKQRPGQGLEWIGMIDPYSSETSLNQKFKDKATLNV |
| | DKISNTAYMQLSSLTSEDSAVYFCARSRGNYAYDMDYWGQGTSVTVSS (SEQ ID NO: 1974) |
| VH | EVQLQESGPELVRPGASVKMSCKASGYTFTSYWMHWVKQRPGQGLEWIGMIDPSNSETSLNQKFKDKATLNV |
| | DKSSKTAYMQLSSLTSEDSAVYYCARSRGNYAYDMDYWGQGTSVTVSS (SEQ ID NO: 1975) |
| VH | EVQLQESGAELVMPGASVKMSCKASGYTFTDYWMHWVKQRPGQGLEWIGAIDTSDSYTSYHQNFKGKATLTE |
| | DESSSTAYMQLSSLTSEDSAIYYCARRDYGGFGYWGQGTTLTVSS (SEQ ID NO: 1976) |
| VH | EVQLQESGPELVKPGASVKIPCKASGYTFTDYNMDWVKKSHGKSLEWIGDIDPNNGGTIYNQKFKGKATLTV |
| | DKSSRTAYMELRSLTSEDTAVYYCARWRSSMDYWGQGTSVTVSS (SEQ ID NO: 1977) |
| VH | EVQLQESGPELVKPGASVKIPCRASGYIFTDYNMDWVKQSHGKSLEWIGDIDPNNGGTIYNQKFKDKTTLTV |
| | DKSSRTAYMELRSLTSEDTAVYYCARWRSSMDYWGQGTSVTVSS (SEQ ID NO: 1978) |
| VH | EVQLQESGPELVKPGASVKIPCKASGYTFTDYNMDWVKQNHGKSLEWIGDIDPNNGDTIYNQKFKGKATLTV |
| | DKSSRTAYMELRSLTSEDTAVYYCARWRSSMDYWGQGTSVTVSS (SEQ ID NO: 1979) |
| VH | EVQLQESGPELVKPGASVKIPCKASGYTFTDYNMDWVKQSHGKSLEWIGDIDPNSGGSIYNQKFKGKATLTV |
| | DKSSRTVYMELRSLTSEDTAVYYCARWRSSMDYWGQGTSVTVSS (SEQ ID NO: 1980) |
| VH | EVQLQESGPELVKPGASVKITCKASGYTFTDYNMDWVKQSHGKSLEWIGDIDPNNGGTIYNQKFKGKATLTV |
| | DKSSNTAYMELRSLASEDTAVYYCARWRSSMDYWGQGTSVSVSS (SEQ ID NO: 1981) |
| VH | EVQLQESGPELVKPGASVKIPCKASGYTFTDYNMDWVKQSHGKSLEWIGDIDPNNGGTIYNQNFKGKATLTV |
| | DKSSSTAYMELRSLTSEDTAVYYCARWRSSMDYWGQGTSVTVSS (SEQ ID NO: 1982) |
| VH | EVQLQESGPELVKPGASVKIPCKASGYTFTDYNMDWVKQSHGKSLEWIGDIDPNNGGIIYNQKFKGKAALTV |
| | DKSSSTAYMELRSLTSEDTAVYYCARWRSSMDYWGQGTSVTVSS (SEQ ID NO: 1983) |
| VH | EVQLQESGPELVKPGASVKIPCKASGYTFTDYNMDWVKQSHGKSLEWIGDIDPNNGGIIYNQKFKGKAALTV |
| | DKSSSTAYMELRSLTSEDTAVYYCTRWRSSMDYWGQGTSVTVSS (SEQ ID NO: 1984) |
| VH | EVQLQESGPELVKPGASVKIPCKASGYTFTDYNMDWVKQSHGKSLEWIGDIDPNNGNTIYNQKFKGKATLTV |
| | DKSSSTAYMELRSLTSEDTAVYYCTKWRSSMDYWGQGTSVTVSS (SEQ ID NO: 1985) |
| VH | EVQLQESGPELVRPGASVKIPCKASGYTFTDYNMDWVMQSHGKSLEWIGDIDPNNGGTIYNQKFKGKATLTV |
| | DKSSSTAYMELRSLTSEDTAVYYCTRWRSSMDYWGQGTSVTVSS (SEQ ID NO: 1986) |
| VH | EVQLQESGPELVKPGASVKIPCKASGYTFTDYNVDWVKQSHGKSLEWIGDIDPNNGGTFYNQKFKGKATLTV |
| | DKSSSTAHMELRSLTSEDTAVYYCVRWRSSMDYWGQGTSVTVSS (SEQ ID NO: 1987) |
| VH | EVQLQESGPELVKPGASVKIPCKASGYTFTDYNMDWVKQSHGKSLEWIGDIDPNTGTTFYNQDFKGKATLTV |
| | DKSSSTAYMELRSLTSEDTAVYYCARWRSSMDYWGQGTSLTVSS (SEQ ID NO: 1988) |
| VH | EVQLQESGAELVRPGASVTLSCKASGYTFTDYEMHWVKQTPVHGLEWIGVIDPGTGGTAYNQKFKVKALLTA |
| | DKSSNTAYMELRSLTSEDSAVYYCTSEKFGSNYYFDYWGQGTTLTVSS (SEQ ID NO: 1989) |
| VH | EVQLQESGAELVRPGASVTLSCKASGYTFTDYEIHWVKQTPVHGLEWIGAIDPETGGTAYNQKFKGKAILTA |
| | DKSSSTAYMELRSLTSEDSAVYYCTSEKFGSSYYFDYWGQGTTFTVSS (SEQ ID NO: 1990) |
| VH | EVQLQESGPGLVKPSQSLSLTCTVTGYSITSDYAWNWIRQFPGNKLEWMGYITYSGSPTYNPSLKSQFSITR |
| | DTSKNQFFLQLNSLTTEDTATYYCARGLGGHYFDYWGQGTTLTVSS (SEQ ID NO: 1991) |
| VH | EVQLQESGPGLVKPSQSLSLTCTVTGYSITSDYAWNWIRQFPGNKLEWMGYITYSGSPTYNPSLKSQFSITR |
| | DTSKNQFFLQLNSVTTEDTATYYCARGLGGHYFDYWGQGTTLTVSS (SEQ ID NO: 1992) |
| VH | EVQLQESGPDLVKPSQSLSLTCTVTGYSITSGYSWHWIRQFPGNKLEWMGFIHYSGDTNYNPSLKSRFSITR |
| | DTSKNQFFLHLNSVTPEDTATYYCASPSRLLFDYWGHGTTLTVSS (SEQ ID NO: 1993) |
| VH | EVQLQESGPGLVAPSQSLSITCTVSGFSLTNYGVDWVRQSPGKGLEWLGVIWGVGSTNYNSALKSRLSISKD |
| | NSKSQVFLKMNSLQTDDTAMYYCASDGFVYWGQGTLVTVSS (SEQ ID NO: 1994) |
| VH | EVQLQESGPGLVAPSQSLSITCTVSGFSLTSYGVDWVRQSPGKGLEWLGVIWGIGSTNYNSALKSRLSISKD |
| | NSKSQVFLKMNSLQSDDTAMYYCASDGFVYWGQGTLVTVSS (SEQ ID NO: 1995) |
| VH | EVQLQESGPSLVQPSQSLSITCTVSGFSLTSYGVHWVRQSPGKGLEWLGVIWRGGNTDYNAAFMSRLSITKD |
| | NSKSQVFFKMNSLQADDTAIYYCAASMIGGYWGQGTTLTVSS (SEQ ID NO: 1996) |
| VH | EVQLQESGPSLVQPSQSLSITCTVSGFSLTNYGVHWVRQSPGKGLEWLGVIWRGGNTDYNAAFMSRLSITKD |
| | NSKSQVFFKFHSLQTDDTAIYYCAASMIGGYWGQGTTLTVSS (SEQ ID NO: 1997) |
| VH | QVQLVQSGAEVKKPGASVKVSCKASGYTFTSYWMHWVRQAPGQGLEWMGMIDPSNSETSLNQKFQGRVTMTV |
| | DKSTNTVYMELSSLRSEDTAVYYCARSRGNYAYEMDYWGQGTLVTVSS (SEQ ID NO: 1998) |
| VH | EVQLVQSGAEVKKPGASVKVSCKASGYTFTSYWMHWVRQAPGQGLEWMGMIDPSNSETSLNQKFQGRVTLNV |
| | DKSTNTAYMELSSLRSEDTAVYYCARSRGNYAYEMDYWGQGTLVTVSS (SEQ ID NO: 1999) |
| VH | EVQLVQSGTEVTKPGASVKVSCKASGYTFTSYWMHWVRQAPGQGLEWLGMIDPSNSETTLNQKFQGRVTMTV |
| | DKSTNTVYMELTSLRSEDTAVYYCARSRGNYAYEMDYWGQGTLVTVSS (SEQ ID NO: 2000) |
| VH | EVQLVQSGAEVKKPGASVKVSCKASGYTFTDYEMHWVRQAPGQGLEWMGIIDPGTGGTAYNQKFQGRVTMTA |
| | DKSTSTVYMELSSLRSEDTAVYYCTSEKFGSNYYFDYWGQGTLVTVSS (SEQ ID NO: 2001) |
| VH | EVQLVQSGAEVKKPGASVKVSCKASGYTFTDYEMHWVRQAPGQGLEWMGIIDPGTGGTAYNQKFQGRVTMTA |
| | DKSTNTVYMELSSLRSEDTAVYYCTSEKFGSNYYFDYWGQGTLVTVSS (SEQ ID NO: 2002) |
| VH | EVQLVQSGAEVKKPGASVKVSCKASGYTFTDYEMHWVRQAPGQRLEWMGVIDPGTGGTAYNQKFQGRVTITA |
| | DKSASTAYMELSSLRSEDTAVYYCTSEKFGSNYYFDYWGQGTLVTVSS (SEQ ID NO: 2003) |
| VL | DIVLTQTPAIMSASPGEKVTLTCSASSSVSSNYLYWYQQRPGSSPKLWIYSTSNLASGVPARFSGSGSGTSY |
| | SLTISSMEAEDAASYFCHQWSSYPPTFGSGTKLEIK (SEQ ID NO: 2004) |
| VL | DIVITQTTAIMSASPGEKVTLTCSASSSVSSNYLYWYQQRPGSSPKLWIYSTSNLASGVPARFSGSGSGTSY |
| | SLTISSMEAEDAASYFCHQWSSYPPTFGSGTKLEIK (SEQ ID NO: 2005) |
| VL | DIVMTQTPATMSASPGEKVTLTCSASSSVNSNYLYWYQQKPGSSPKVWIYSTSNLASGVPARFSGSGSGTSY |
| | SLTISSMEAEDAASYFCHQWSSYPPTFGSGTKLELK (SEQ ID NO: 2006) |
| VL | DIVMTQTTATMSASPGEKVTLTCSASSSVNSNYLYWYQQKPGSSPKVWIYSTSNLASGVPARFSGSGSGTSY |
| | SLTISSMEAEDAASYFCHQWSSYPPTFGSGTKLELK (SEQ ID NO: 2007) |
| VL | DIVLTQSTAIMSASPGEKVTLTCSASSGVNSNYLYWYQQKPGSSPKLWIYSTSNLASGVPARFSGSGSGTSY |
| | SLTISSVEAEDAASYFCHQWSSYPPTFGSGTKLEIK (SEQ ID NO: 2008) |
| VL | DIVLTQTPSSLSASLGDRVTISCSASQGISNYLNWYQQKPDGTVKLLIYYTSSLHSGVPSRFSGSGSGTDYS |
| | LTISNLEPEDIATYYCQQYSKLPWTFGGGTKLEIK (SEQ ID NO: 2009) |
| VL | DIVLTQSPSSLSASLGDRVTISCSASQGISNYLNWYQQKPDGTVKLLIYYTSSLHSGVPSRFSGSGSGTDYS |
| | LTISNLEPEDIATYYCQQYSKLPWTFGGGTKLEIK (SEQ ID NO: 2010) |
| VL | DIVITQSPSSLSASLGDRVTISCSASQGISNYLNWYQQKPDGTVKLLIYYTSSLHSGVPSRFSGSGSGTDYS |
| | LTISNLEPEDIATYYCQQYSELPWTFGGGTKLEIK (SEQ ID NO: 2011) |
| VL | DIVMTQSPSSLSASLGDRVTISCSASQGISNYLNWYQQRPDGTVKLLIYYTSSLHSGVPSRFSGSGSGTDYS |
| | LTISNLEPEDIATYYCQQYSNLPWTFGGGTKLEIK (SEQ ID NO: 2012) |
| VL | DIVMTQSPSSLSASLGDRVTISCSASQGISNYLNWYQQKPDGTVKLLIYYTSSLHSGVPSRFSGSGSGTDYS |
| | LTISNLEPEDIATYYCQQYSELPWTFGGGTKLEIK (SEQ ID NO: 2013) |
| VL | DIVMTQSTSSLSASLGDRVTISCSASQGISHYLNWYQQKPDGTVKLLIYYTSSLHSGVPSRFSGSGSGTDYS |
| | LTIRNLEPEDIATYYCQQYSELPWTFGGGTKLEIK (SEQ ID NO: 2014) |
| VL | DIVMTQSPSSLSASLGDRVTISCSASQGISHYLNWYQQKPDGTVKLLIYYTSSLHSGVPSRFSGSGSGTDYS |
| | LTIRNLEPEDIATYYCQQYSELPWTFGGGTKLEIK (SEQ ID NO: 2015) |
| VL | DIVMTQSPSSLSASLGDRVTISCSASQDISSYLNWYQQKPDGTVKLLIYYTSSLHSGVPSRFSGSGSGTDYS |
| | LTISNLEPEDIATYYCQQYSELPWTFGGGTKLEIK (SEQ ID NO: 2016) |
| VL | DIVMTQTPSSLSASLGDRVTISCSASQGISYYLNWYQQKPDGTIKLLIYYTLSLHSGVPSRFSGSGSGTDYS |
| | LTISNLEPEDIATYYCQQYSELPWTFGGGTKLEIK (SEQ ID NO: 2017) |
| VL | DIVMTQTPSSMSASLGDRVTISCSASQGISNYLNWYQQKPDGTVKLLIYYTSSLHSGVPSRFSGSGSGTDYS |
| | LTISNLEPEDIATYYCQQYSYLPWTFGGGTKLEIK (SEQ ID NO: 2018) |
| VL | DIVMTQTPSSLSASLGDRVTISCSASQGIGNYLNWYQQKPDGTVKLLIYYTSNLHSGVPSRFSGRGSGTDYS |
| | LTISNLEPEDIATYYCQQYSNLPWTFGGGTKLEIK (SEQ ID NO: 2019) |
| VL | DIVMTQSPSSLSASLGDRVTISCSASQGISNYLNWYQQKPDGTVKLLIYYTSNLHSGVPSRFSGSGSGTDYS |
| | LTISDLAPEDIATYYCQQYSYLPWTFGGGTKLEIK (SEQ ID NO: 2020) |
| VL | DIVITQSPLSLPVGLGDQASISCRSSQSLVHSNGNTYLHWYLQKPGQSPKLLIYKVSNRFSGVPDRFSGSGS |
| | GTDFTLKISRVEAEDLGVYFCSQSTHVPYTFGGGTKLEIK (SEQ ID NO: 2021) |
| VL | DIVLTQTPLSLPVSLGDQASISCRSSQSIVHSNGNTYLEWYLQKPGQSPKLLIYKVSNRFSGVPDRFSGSGS |
| | GTNFTLKISRVEAEDLGVYYCFQGSHVPLTFGAGTKLELK (SEQ ID NO: 2022) |
| VL | DIVLTQSPLSLPVSLGDQASISCRSSQSIVHSDGNTYLEWYLQKPGQSPKLLIYKVSNRFSGVPDRFSGSGS |
| | GTDFTLKISRVEAEDLGIYYCFQGSHVPLTFGAGTKLELK (SEQ ID NO: 2023) |
| VL | DIVITQTPLSLPVSLGDQASISCRSSQTIVHSDGNTYLEWYLQKPGQSPKLLIYKVSNRFSGVPDRFSGSGS |
| | GTDFTLKISRVEAEDLGVYYCFQGSHVPLTFGAGTKLEIK (SEQ ID NO: 2024) |
| VL | DIVMTQSTLSLPVSLGDQVSISCRSSQSIVHSDGNTYLEWYLQKPGQSPNLLIYKVSNRFSGVPDRFSGSGS |
| | GTDFTLKISRVEAEDLGVYYCFQGSHVPLTFGAGTKLELK (SEQ ID NO: 2025) |
| VL | DIVLTQDELSNPVTSGESVSISCRSSKSLLYKDGKTYLNWFLQRPGQSPQVLIYFMSTRASGVSDRFSGSGS |
| | GTDFTLEISRVKAEDVGVYYCQQLVDFPFTFGSGTKLELK (SEQ ID NO: 2026) |
| VL | DIVMTQDELYNPVTSGESVSISCRSSKSLLYKDGKTYLNWFLQRPGQSPQVLIYFMSTRASGVSDRFSGSGS |
| | GTDFTLEISRVKAEDVGVYYCQQLVDFPFTFGSGTKLEIK (SEQ ID NO: 2027) |
| VL | DIVMTQSPSSLTVTAGEKVTMSCKSSQSLLNSGTQKNYLTWYQQKPGQPPKLLIYWASTRESGVPDRFTGSG |
| | SGTDFTLTISSVQAEDLAVYYCQNDYSYPLTFGAGTKLEIK (SEQ ID NO: 2028) |
| VL | DIVLTQTTATLSVTPGDRVSLSCRASQSISDYLHWYQQKSHESPRLLIKYASQSISGIPSRFSGSGSGSDFT |
| | LTVNSVEPEDVGVYYCQNGHSYPYTFGGGTKLEIK (SEQ ID NO: 2029) |
| VL | DIVLTQSPDTLSVTPGDRVSLSCRASQSISDYLHWYQQKSHESPRLLIKYASQSISGIPSRFSGSGSGSDFT |
| | LSINSVEPEDVGVYYCQNGHSYPYTFGGGTKLELK (SEQ ID NO: 2030) |
| VL | EIVLTQSPATLSLSPGERATLSCRASSSVSSNYLYWYQQKPGQAPRLLIYSTSNRATGIPARFSGSGSGTDY |
| | TLTISSLEPEDFAVYYCHQWSSYPPTFGQGTKLEIK (SEQ ID NO: 2031) |
| VL | DIVLTQSPATLSLSPGERATLSCRASSSVSSNYLYWYQQKPGQAPRLLIYSTSNLATGIPARFSGSGSGTDY |
| | TLTISSLEPEDFAVYFCHQWSSYPPTFGQGTKLEIK (SEQ ID NO: 2032) |
| VL | DIVLTQSPGTLSLSPGEKVTLSCRASSSVSSNYLYWYQQKPGQAPRLVIYSTSNLATGIPDRFSGSGSGTDY |
| | TLTISRLEPEDFAVYFCHQWSSYPPTFGQGTKVEIK (SEQ ID NO: 2034) |
| VL | DVVMTQSPLSLPVTLGQPASISCRSSQTIVHSDGNTYLEWYQQRPGQSPRLLIYKVSNRFSGVPDRFSGSGS |
| | GTDFTLKISRVEAEDVGVYYCFQGSHVPLTFGQGTKLEIK (SEQ ID NO: 2035) |
| VL | DIVMTQSPLSLPVTLGQPASISCRSSQTIVHSDGNTYLEWYQQRPGQSPKLLIYKVSNRFSGVPDRFSGSGS |
| | GTDFTLKISRVEAEDVGVYYCFQGSHVPLTFGQGTKLEIK (SEQ ID NO: 2036) |
| VL | DIVMTQTPLSSPVTLGQPASISCRSSQTIVHSDGNTYLEWYQQRPGQPPRLLIYKVSNRFSGVPDRFSGSGA |
| | GTDFTLKISRVEAEDVGVYYCFQGSHVPLTFGQGTKLEIK (SEQ ID NO: 2037) |

Note that (i) the sequences provided for Group B, Group P, Group Q, and Group V and designated as “HC” and “LC” are heavy chain and light chain amino acid sequences; all other sequences presented in Table 7 are variable heavy chain and variable light chain sequences; (ii) the sequence provided in Group D is a fusion protein comprising a B7-DC polypeptide and an immunoglobulin polypeptide; and (iii) in Group I, the last sequence is a bispecific antibody (BsAb) sequence.

[0560] In some embodiments, the activatable anti-PD-1 antibody includes a CDR sequence shown in Table 8, a combination of VL CDR sequences (VL CDR1, VL CDR2, VL CDR3) selected from the group consisting of those combinations shown in a single row Table 8, a combination of VH CDR sequences (VH CDR1, VH CDR2, VH CDR3) selected from the group consisting of those combinations shown in Table 8, or a combination of VL CDR and VH CDR sequences (VL CDR1, VL CDR2, VL CDR3, VH CDR1, VH CDR2, VH CDR3) selected the group consisting of those combinations shown in Table 8. The CDR regions were defined according to AbM definition as described in the CDR definition table in Andrew C. R. Martin's Bioinformatics Group website at UCL.

TABLE 8
CDR Sequences for Antibodies and Activatable Antibodies that Bind PD-1

| | VH | | | VL | | |
|---|---|---|---|---|---|---|
| | CDR1 | CDR2 | | | CDR2 | CDR3 |
| AB | (SEQ ID | (SEQ ID | CDR3 (SEQ | CDR1 (SEQ ID | (SEQ ID | (SEQ ID |
| Name | NO) | NO) | ID NO) | NO) | NO) | NO) |
| M13 | GFTFSGYAMS | YISNSGGNAH | EDYGTSPFVY | RASESVDNYGIS | AASNQGS | QQSKDVPWT |
| | (653) | (658) | (664) | FMN (669) | (678) | (683) |
| M19 | GYTFTDYYMD | YIYPKNGGSS | KVVATDY | KSSQSLLYSSNQ | WASIRES | QQCDSYPWT |
| | (654) | (659) | (665) | KNYL (670) | (679) | (684) |
| M3 | GFTFSNYAMS | YISNGGGDTH | ENYGTSPFVY | RASESVDNYGIS | AASNQGS | QQSKDVPWT |
| | (655) | (660) | (666) | FMN (669) | (678) | (683) |
| M5 | GFSFSSYDMS | TISGGGRYTY | NYYGFDY | KASQDVGTAVA | WASTRHT | QQYSSYPWT |
| | (656) | (661) | (667) | (671) | (680) | (685) |
| M14 | GFTFSSYGMS | TISGGGRDIY | LYLGFDY | LASQTIGTWLA | AATSLAD | QQLYSIPWT |
| | (657) | (662) | (668) | (672) | (681) | (686) |
| A | GFTFSGYAMS | YISNSGGNAH | EDYGTSPFVY | | | |
| | (653) | (658) | (664) | | | |
| Ab | GFTFSGYAMS | YISNSGGNAH | EDYGTSPFVY | | | |
| | (653) | (658) | (664) | | | |
| Ae | GFTFSGYAMS | YISNSGGNTH | EDYGTSPFVY | | | |
| | (653) | (663) | (664) | | | |
| Af | GFTFSGYAMS | YISNSGGNTH | EDYGTSPFVY | | | |
| | (653) | (663) | (664) | | | |
| Ba | GYTFTDYYMD | YIYPKNGGSS | KVVATDY | | | |
| | (654) | (659) | (665) | | | |
| Bb | GYTFTDYYMD | YIYPKNGGSS | KVVATDY | | | |
| | (654) | (659) | (665) | | | |
| C | GFTFSNYAMS | YISNGGGDTH | ENYGTSPFVY | | | |
| | (655) | (660) | (666) | | | |
| Ca | GFTFSNYAMS | AYISNQGGDT | ENYGTSPFVY | | | |
| | (655) | H (2041) | (666) | | | |
| D | GFSFSSYDMS | TISGGGRYTY | NYYGFDY | | | |
| | (656) | (661) | (667) | | | |
| 1.0 | | | | RASESVDNYGIS | AASNQGS | QQSKDVPWT |
| | | | | FMN (673) | (678) | (683) |
| 1.1 | | | | RASESVDNYGIS | AASNQGS | QQSKDVPWT |
| | | | | FMN (673) | (678) | (683) |
| 1.2 | | | | RASESVDQYGIS | AASNQGS | QQSKDVPWT |
| | | | | FMN (674) | (678) | (683) |
| 1.4 | | | | RASESVDSYGIS | AASNQGS | QQSKDVPWT |
| | | | | FMN (675) | (678) | (683) |
| 1.5 | | | | RASESVDAYGIS | AASNQGS | QQSKDVPWT |
| | | | | FMN (676) | (678) | (683) |
| 1.6 | | | | RASESVDNYGIS | AASDQGS | QQSKDVPWT |
| | | | | FMN (673) | (682) | (683) |
| cl | | | | RASESVDAYGIS | AASNQGS | QQSKDVPWT |
| 1.7 | | | | FMN (676) | (678) | (683) |
| 1.9 | | | | RASESVDAY | AASNQGS | QQSKDVPWT |
| | | | | (676)GISFMN | (678) | (683) |
| 1.10 | | | | RASESVDAYGIS | AASNQGS | QQSKDVPWT |
| | | | | FMN (676) | (678) | (683) |
| 2 | | | | KSSQSLLYSSNQ | WASIRES | QQSDSYPWT |
| | | | | KNYLA (677) | (679) | (687) |
| 4 | | | | KASQDVGTAVA | WASTRHT | QQYSSYPWT |
| | | | | (671) | (680) | (685) |

[0561] In some embodiments, the activatable anti-PD-1 antibody comprises or is derived from an antibody that is manufactured, secreted or otherwise produced by a hybridoma, such as, for example, the hybridoma(s) disclosed in U.S. Pat. No. 8,927,697 and US Patent Application Publication Nos. US 2011-0171215 and US 2015-0152180, and deposited at the European Collection of Cell Cultures (ECACC) under Accession Number 08090902; 08090903; and 08090901.

[0562] In some embodiments, the activatable anti-PD-1 antibody comprises or is derived from an antibody that is manufactured, secreted or otherwise produced by a hybridoma, such as, for example, the hybridoma(s) disclosed in US Patent Application Publication No. US 2014-0335093, and deposited at the Collection Nationale De Cultures De Microorganismes (CNCM) under deposit number 1-4122.

[0563] In some embodiments, the activatable anti-PD-1 antibody comprises or is derived from an antibody that is manufactured, secreted or otherwise produced by a hybridoma, such as, for example, the hybridoma(s) disclosed in PCT Publication Nos. WO 2015/058573 or WO 2014/206107, and deposited at the China Culture Collection Committee General Microbiology Center under Accession no. 8351.

[0564] In some embodiments, the activatable anti-PD-1 antibody comprises or is derived from an antibody that is manufactured, secreted or otherwise produced by a hybridoma, such as, for example, the hybridoma(s) disclosed in US Patent Application Publication No. US2011177088, and deposited at the Collection Nationale De Cultures De Microorganismes (CNCM) under deposit number 1-3745.

[0565] In some embodiments, the activatable anti-PD-1 antibody includes a CDR sequence shown in Table 9, a combination of VL CDR sequences selected from the group consisting of those combinations shown in Table 9, and/or a combination of VH CDR sequences selected from the group consisting of those combinations shown in Table 9.

[0566] In some embodiments, the activatable anti-PD-1 antibody includes a combination of heavy chain CDR sequences selected from the group consisting of the combinations shown in Group A in Table 9. In some embodiments, the activatable anti-PD-1 antibody includes a combination of light chain CDR sequences selected from the group consisting of the combinations shown in Group A in Table 9. In some embodiments, the activatable anti-PD-1 antibody includes a combination of heavy chain CDR sequences selected from the group consisting of the combinations shown in Group A in Table 9, and a combination of light chain CDR sequences selected from the group consisting of the combinations shown in Group A in Table 9.

[0567] In some embodiments, the activatable anti-PD-1 antibody includes a combination of heavy chain CDR sequences selected from the group consisting of the combinations shown in Group B in Table 9. In some embodiments, the activatable anti-PD-1 antibody includes a combination of light chain CDR sequences selected from the group consisting of the combinations shown in Group B in Table 9. In some embodiments, the activatable anti-PD-1 antibody includes a combination of heavy chain CDR sequences selected from the group consisting of the combinations shown in Group B in Table 9, and a combination of light chain CDR sequences selected from the group consisting of the combinations shown in Group B in Table 9.

[0568] In some embodiments, the activatable anti-PD-1 antibody includes a combination of heavy chain CDR sequences selected from the group consisting of the combinations shown in Group C in Table 9. In some embodiments, the activatable anti-PD-1 antibody includes a combination of light chain CDR sequences selected from the group consisting of the combinations shown in Group C in Table 9. In some embodiments, the activatable anti-PD-1 antibody includes a combination of heavy chain CDR sequences selected from the group consisting of the combinations shown in Group C in Table 9, and a combination of light chain CDR sequences selected from the group consisting of the combinations shown in Group C in Table 9.

[0569] In some embodiments, the activatable anti-PD-1 antibody includes a combination of heavy chain CDR sequences selected from the group consisting of the combinations shown in Group E in Table 9. In some embodiments, the activatable anti-PD-1 antibody includes a combination of light chain CDR sequences selected from the group consisting of the combinations shown in Group E in Table 9. In some embodiments, the activatable anti-PD-1 antibody includes a combination of heavy chain CDR sequences selected from the group consisting of the combinations shown in Group E in Table 9, and a combination of light chain CDR sequences selected from the group consisting of the combinations shown in Group E in Table 9.

[0570] In some embodiments, the activatable anti-PD-1 antibody includes a combination of heavy chain CDR sequences selected from the group consisting of the combinations shown in Group F in Table 9. In some embodiments, the activatable anti-PD-1 antibody includes a combination of light chain CDR sequences selected from the group consisting of the combinations shown in Group F in Table 9. In some embodiments, the activatable anti-PD-1 antibody includes a combination of heavy chain CDR sequences selected from the group consisting of the combinations shown in Group F in Table 9, and a combination of light chain CDR sequences selected from the group consisting of the combinations shown in Group F in Table 9.

[0571] In some embodiments, the activatable anti-PD-1 antibody includes a combination of heavy chain CDR sequences selected from the group consisting of the combinations shown in Group G in Table 9. In some embodiments, the activatable anti-PD-1 antibody includes a combination of light chain CDR sequences selected from the group consisting of the combinations shown in Group G in Table 9. In some embodiments, the activatable anti-PD-1 antibody includes a combination of heavy chain CDR sequences selected from the group consisting of the combinations shown in Group Gin Table 9, and a combination of light chain CDR sequences selected from the group consisting of the combinations shown in Group G in Table 9.

[0572] In some embodiments, the activatable anti-PD-1 antibody includes a combination of heavy chain CDR sequences selected from the group consisting of the combinations shown in Group H in Table 9. In some embodiments, the activatable anti-PD-1 antibody includes a combination of light chain CDR sequences selected from the group consisting of the combinations shown in Group H in Table 9. In some embodiments, the activatable anti-PD-1 antibody includes a combination of heavy chain CDR sequences selected from the group consisting of the combinations shown in Group H in Table 9, and a combination of light chain CDR sequences selected from the group consisting of the combinations shown in Group H in Table 9.

[0573] In some embodiments, the activatable anti-PD-1 antibody includes a combination of heavy chain CDR sequences selected from the group consisting of the combinations shown in Group L in Table 9. In some embodiments, the activatable anti-PD-1 antibody includes a combination of light chain CDR sequences selected from the group consisting of the combinations shown in Group L in Table 9. In some embodiments, the activatable anti-PD-1 antibody includes a combination of heavy chain CDR sequences selected from the group consisting of the combinations shown in Group L in Table 9, and a combination of light chain CDR sequences selected from the group consisting of the combinations shown in Group L in Table 9.

[0574] In some embodiments, the activatable anti-PD-1 antibody includes a combination of heavy chain CDR sequences selected from the group consisting of the combinations shown in Group M in Table 9. In some embodiments, the activatable anti-PD-1 antibody includes a combination of light chain CDR sequences selected from the group consisting of the combinations shown in Group M in Table 9. In some embodiments, the activatable anti-PD-1 antibody includes a combination of heavy chain CDR sequences selected from the group consisting of the combinations shown in Group M in Table 9, and a combination of light chain CDR sequences selected from the group consisting of the combinations shown in Group M in Table 9.

[0575] In some embodiments, the activatable anti-PD-1 antibody includes a combination of heavy chain CDR sequences selected from the group consisting of the combinations shown in Group N in Table 9. In some embodiments, the activatable anti-PD-1 antibody includes a combination of light chain CDR sequences selected from the group consisting of the combinations shown in Group N in Table 9. In some embodiments, the activatable anti-PD-1 antibody includes a combination of heavy chain CDR sequences selected from the group consisting of the combinations shown in Group N in Table 9, and a combination of light chain CDR sequences selected from the group consisting of the combinations shown in Group N in Table 9.

[0576] In some embodiments, the activatable anti-PD-1 antibody includes a combination of heavy chain CDR sequences selected from the group consisting of the combinations shown in Group O in Table 9. In some embodiments, the activatable anti-PD-1 antibody includes a combination of light chain CDR sequences selected from the group consisting of the combinations shown in Group O in Table 9. In some embodiments, the activatable anti-PD-1 antibody includes a combination of heavy chain CDR sequences selected from the group consisting of the combinations shown in Group O in Table 9, and a combination of light chain CDR sequences selected from the group consisting of the combinations shown in Group O in Table 9.

[0577] In some embodiments, the activatable anti-PD-1 antibody includes a combination of heavy chain CDR sequences selected from the group consisting of the combinations shown in Group P in Table 9. In some embodiments, the activatable anti-PD-1 antibody includes a combination of light chain CDR sequences selected from the group consisting of the combinations shown in Group P in Table 9. In some embodiments, the activatable anti-PD-1 antibody includes a combination of heavy chain CDR sequences selected from the group consisting of the combinations shown in Group P in Table 9, and a combination of light chain CDR sequences selected from the group consisting of the combinations shown in Group P in Table 9.

[0578] In some embodiments, the activatable anti-PD-1 antibody includes a combination of heavy chain CDR sequences selected from the group consisting of the combinations shown in Group Q in Table 9. In some embodiments, the activatable anti-PD-1 antibody includes a combination of light chain CDR sequences selected from the group consisting of the combinations shown in Group Q in Table 9. In some embodiments, the activatable anti-PD-1 antibody includes a combination of heavy chain CDR sequences selected from the group consisting of the combinations shown in Group Q in Table 9, and a combination of light chain CDR sequences selected from the group consisting of the combinations shown in Group Q in Table 9.

[0579] In some embodiments, the activatable anti-PD-1 antibody includes a combination of heavy chain CDR sequences selected from the group consisting of the combinations shown in Group R in Table 9. In some embodiments, the activatable anti-PD-1 antibody includes a combination of light chain CDR sequences selected from the group consisting of the combinations shown in Group R in Table 9. In some embodiments, the activatable anti-PD-1 antibody includes a combination of heavy chain CDR sequences selected from the group consisting of the combinations shown in Group R in Table 9, and a combination of light chain CDR sequences selected from the group consisting of the combinations shown in Group R in Table 9.

[0580] In some embodiments, the activatable anti-PD-1 antibody includes a combination of heavy chain CDR sequences selected from the group consisting of the combinations shown in Group T in Table 9. In some embodiments, the activatable anti-PD-1 antibody includes a combination of light chain CDR sequences selected from the group consisting of the combinations shown in Group T in Table 9. In some embodiments, the activatable anti-PD-1 antibody includes a combination of heavy chain CDR sequences selected from the group consisting of the combinations shown in Group T in Table 9, and a combination of light chain CDR sequences selected from the group consisting of the combinations shown in Group T in Table 9.

[0581] In some embodiments, the activatable anti-PD-1 antibody includes a combination of heavy chain CDR sequences selected from the group consisting of the combinations shown in Group U in Table 9. In some embodiments, the activatable anti-PD-1 antibody includes a combination of light chain CDR sequences selected from the group consisting of the combinations shown in Group U in Table 9. In some embodiments, the activatable anti-PD-1 antibody includes a combination of heavy chain CDR sequences selected from the group consisting of the combinations shown in Group U in Table 9, and a combination of light chain CDR sequences selected from the group consisting of the combinations shown in Group U in Table 9.

[0582] In some embodiments, the activatable anti-PD-1 antibody includes a combination of heavy chain CDR sequences selected from the group consisting of the combinations shown in Group V in Table 9. In some embodiments, the activatable anti-PD-1 antibody includes a combination of light chain CDR sequences selected from the group consisting of the combinations shown in Group V in Table 9. In some embodiments, the activatable anti-PD-1 antibody includes a combination of heavy chain CDR sequences selected from the group consisting of the combinations shown in Group V in Table 9, and a combination of light chain CDR sequences selected from the group consisting of the combinations shown in Group V in Table 9.

[0583] In some embodiments, the activatable anti-PD-1 antibody includes a combination of heavy chain CDR sequences selected from the group consisting of the combinations shown in Group W in Table 9. In some embodiments, the activatable anti-PD-1 antibody includes a combination of light chain CDR sequences selected from the group consisting of the combinations shown in Group W in Table 9. In some embodiments, the activatable anti-PD-1 antibody includes a combination of heavy chain CDR sequences selected from the group consisting of the combinations shown in Group W in Table 9, and a combination of light chain CDR sequences selected from the group consisting of the combinations shown in Group W in Table 9.

[0584] In some embodiments, the activatable anti-PD-1 antibody includes a combination of heavy chain CDR sequences selected from the group consisting of the combinations shown in Group X in Table 9. In some embodiments, the activatable anti-PD-1 antibody includes a combination of light chain CDR sequences selected from the group consisting of the combinations shown in Group X in Table 9. In some embodiments, the activatable anti-PD-1 antibody includes a combination of heavy chain CDR sequences selected from the group consisting of the combinations shown in Group X in Table 9, and a combination of light chain CDR sequences selected from the group consisting of the combinations shown in Group X in Table 9.

TABLE 9
Additional CDR Sequences for Antibodies and Activatable Antibodies that Bind PD-1

| VH | | | VL | | |
|---|---|---|---|---|---|
| CDR1 | CDR2 | CDR3 | CDR1 | CDR2 | CDR3 |
| (SEQ ID NO:) | (SEQ ID NO:) | (SEQ ID NO:) | (SEQ ID NO:) | (SEQ ID NO:) | (SEQ ID NO:) |

Group A

| | | | | | |
|---|---|---|---|---|---|
| NYGMH | VIWYDGSNKYYADSVKG | NDDY (700) | RASQSVSSYLA | DASNRAT | QQRSNWPLT |
| (688) | (694) | | (704) | (706) | (710) |
| NYGFH | VIWYDGSKKYYADSVKG | GDDY (701) | RASQSVSSYLA | DTSNRAT | QQRSNWPLT |
| (689) | (695) | | (704) | (707) | (710) |
| NYGMH | LIWYDGSNKYYADSVKG | NVDH (702) | RASQSVSSYLA | DASNRAT | QQSSNWPRT |
| (688) | (696) | | (704) | (706) | (711) |
| NSGMH | VIWYDGSKRYYADSVKG | NDDY (700) | RASQSVSSYLA | DASNRAT | QQSSNWPRT |
| (690) | (697) | | (704) | (706) | (711) |
| RSSFFWG | SIYYSGSTYYNPSLKS | DYDILTGDEDY | RASQGISSWLA | AASNLRS | QQYYSYPRT |
| (691) | (698) | (703) | (705) | (708) | (712) |
| SYGFH | VIWYDGSKKYYADSVKG | GDDY (701) | RASQSVSSYLA | DASNRAT | QQRSNWPLT |
| (692) | (695) | | (704) | (706) | (710) |
| RSSYFWG | SIFYSGETYFNPSLKS | DYDILTGDEDY | RASQGISSWLA | AASSLQS | QQYYSYPRT |
| (693) | (699) | (703) | (705) | (709) | (712) |

Group B

| | | | | | |
|---|---|---|---|---|---|
| SYYLY | GVNPSNGGTNFSEKFK | RDSNYDGGFDY | RASKSVSTSGFSY | LASNLES | QHSWELPLT |
| (713) | S (715) | (717) | LH (719) | (721) | (723) |
| NYYMY | GINPSNGGTNFNEKFK | RDYRFDMGFDY | RASKGVSTSGYSY | LASYLES | QHSRDLPLT |
| (714) | N (716) | (718) | LH (720) | (722) | (724) |
| AASGFTFS | TITGGGRNTYYPDSVK | QGYDGYTWFAY | RASESVDNSGISF | AASNPGS | QQSKEVPWT |
| SYAMS | G (817) | (823) | MN (830) | (836) | (840) |
| (627) | | | | | |
| AASGFTFS | TISGGGSNTYYPDSVK | IYDVAWFAY | RSSQTIVHSDGNT | AASNQGS | FQGSHVPYT |
| SFGMS | (818) | (824) | YLE (831) | (678) | (841) |
| (811) | | | | | |
| KGSGYSFT | VISTHYGDTVYNQRFK | EGYGSLFYFDQ | RASESVDSYGNSF | KVSNRFS | QQNNEVPLT |
| DYALH | G (1832) | (825) | MN (832) | (837) | (842) |
| (812) | | | | | |
| KASGYAFT | YIDLYNGDTSYNEKF | EGRLSFDY | RSSQSIVQSNGNT | LASNLDS | FQGSHVPYT |
| SYNIY | (819) | (826) | YLE (833) | (838) | (843) |
| (813) | | | | | |
| AASGFTFS | YISGGGGNTYYPDTL | ISLTGIFDY | RSSQTIVHGNGNT | SASTLAS | QQGFGTSNVE |
| NYDMS | (820) | (827) | YLE (834) | (839) | NP (844) |
| (814) | | | | | |
| AASGFTFN | TISGGGSYTYYPDSVQ | GNYVYVMDY | QASENIYSSLA | | |
| SYGMS | G (821) | (828) | (835) | | |
| (815) | | | | | |
| KGSGYIFT | VISTYYSNINYNQKFK | EGFGRPYWYFD | | | |
| DYVMH | G (822) | V (829) | | | |
| (816) | | | | | |

Group C

| | | | | | |
|---|---|---|---|---|---|
| GYSITSDY | YINYSGSTSYNPSLKS | WIGSSAWYFDV | RSGQNIVHSNGNTY | KVSNRFF | FQGSHVPFT |
| AWN | (847) | (849) | LE (851) | (853) | (855) |
| (845) | | | | | |
| GYTFTTYY | GINPSNGGINFNEKFK | RDYRYDRGFDY | RASKSVSTSGFNYI | LASNLES | QHSRELPLT |
| LY (846) | (848) | (850) | H (852) | (721) | (856) |

Group E

| | | | | | |
|---|---|---|---|---|---|
| SYGIS | WISAYNGNTNYAQ | DADYSSGSGY | SGDALPKQYAY | KDTERPS | QSADNSITYR |
| (857) | KLQG (861) | (865) | (869) | (872) | V (876) |
| SYYIH | IINPRGATISYAQ | AGIYGFDFDY | TGTSNDVGGYNYVS | DVTNRPS | SSYTIVTNFE |
| (858) | KFQG (862) | (866) | (870) | (873) | VL (877) |
| SGAYYWS | YIYYNGNTYYNPS | ASDYVWGGYRYM | SGSNSNIGSNSVN | GNNQRPS | AAWDDSLNGP |
| (859) | LRS (863) | DAFDI (867) | (871) | (874) | V (878) |
| SSYWMS | AISGSGGSTYYAD | ENWGSYFDL | RASQGISSWLA | KASTLES | QQSYSTPWT |
| (860) | SVKG (864) | (868) | (705) | (875) | (879) |

Group F

| | | | | | |
|---|---|---|---|---|---|
| SSWIH | YIYPSTGFTEYNQ | WRDSSGYHAMDY | RASQSVSTSGYSYMH | FGSNLES | QHSWEIPYT |
| (880) | KFKD (881) | (882) | (883) | (884) | (885) |

Group L

| | | | | | |
|---|---|---|---|---|---|
| GFTFSSYD | VIWYSGSNTYYND | AYFGVDV | RASQGIGNTLA | RASQGIG | QQYDHVPLT |
| YYMH | SLKS (887) | (888) | (889) | NTLA | (891) |
| (886) | | | | (889) | |

Group G

| | | | | |
|---|---|---|---|---|
| GFSLTSYG | VIWAGGSTNYNSA | GFSLTSYGVH | KASQSVSNDVA | YAFHRFT |
| VH (892) | LMS (895) | (896) | (898) | (900) |
| VIWAGGST | ARAYGNYWYIDV | ARAYGNYWYIDV | KSSESVSNDVA | |
| NYNPSLKS | (896) | (897) | (899) | |
| (893) | | | | |
| VIYAGGST | HQAYSSPYT | | | |
| NYNPSLKS | (895) | | | |
| (894) | | | | |

Group H

| | | | | | |
|---|---|---|---|---|---|
| DYEMH | VIESETGGTAYNQ | EGITTVATTYYW | RSSQSIVHSNGNTYLE | KVSNRFS | FQGSHVPLT |
| (901) | KFKG (902) | YFDV (903) | (904) | (905) | (906) |

Group M

| | | | | |
|---|---|---|---|---|
| GYTFTTYP | NFHPYNDDTKYNE | RASSSVISSYLH | STSNLAS | QQYNGYPLT |
| IE (907) | KFK (908) | (909) | (910) | (911) |
| | | | | QQYNSYPLT |
| | | | | (912) |

Group N

| | | | | | |
|---|---|---|---|---|---|
| SYYLY | GVNPSNGGTNFSE | RDSNYDGGFDY | RASKSVSTSGFSYLH | LASNLES | QHSWELPLT |
| (713) | KFK (1596) | (717) | (719) | (721) | (723) |

Group P

| | | | | | |
|---|---|---|---|---|---|
| GYTFTTY | YPGTGG (1597) | WTTGTGAY | SQSLLDSGNQKNF | WAS | DYSYPY |
| (854) | | (1598) | (1599) | (1600) | (1601) |
| TYWMH | NIYPGTGGSNFDE | | KSSQSLLDSGNQKNFL | WASTRES | QNDYSYPYT |
| (1602) | KFK (1603) | | (1833) | (1604) | (1605) |
| GYTFTTYW | | | | | |
| MH | | | | | |
| (1606) | | | | | |

Group Q

| | | | | | |
|---|---|---|---|---|---|
| GFTFSSYT | ISDTGGNT | AKDQGGSYPYYF | QSISSY (1610) | AAS | QQSYSTPPIT |
| (1607) | (1608) | HY (1609) | | (1611) | (1612) |
| GFTVSNNY | IYSGGFT | ARYYYDTSDYWT | QSVSSN (1616) | GAS | QQYNNWPLT |
| (1613) | (1614) | FFDY (1615) | | (1617) | (1618) |
| GFTFSSYG | IWYDGSNI | ARPGHWNYFFEY | QSINNY (1622) | TAS | QQSYSTPPLT |
| (1619) | (1620) | (1621) | | (1623) | (1624) |
| GFTFRNYD | IGSAGDT | TRDIHCSSTRCY | QSISNY (1628) | AAS | QQSYSTPPIT |
| (1625) | (1626) | GMDV (1627) | | (1611) | (1612) |
| GFKFSNEW | IKSKTDGGTT | TTDQDFWSGYYT | | AAS | QQSYSTPPIT |
| (1629) | (1630) | GADYYGMDV | | (1611) | (1612) |
| | | (1631) | | | |
| GGSLNGYY | IDHSGST | AREGLLPFDY | QSVYSNY (1635) | AAS | HQYATSPWT |
| (1632) | (1633) | (1634) | | (1611) | (1636) |
| DDSISSTT | MSYNGNN | ARHLGYNGNWYP | QSVSSSY (1639) | GAS | QQYGSSPWT |
| YY | (1637) | FDF (1638) | | (1640) | (1641) |
| (1637) | | | | | |
| GFTFDDYA | INWSGNNI | TKDISITGTLDA | QGISNW (1645) | SAS | QQAHSFPLT |
| (1642) | (1643) | FDV (1644) | | (1646) | (1647) |
| GFTFSSYG | IWSDGDSE | ARDRDLEDI | QGIRND (1650) | AAS | LQHNSYPLT |
| (1619) | (1648) | (1649) | | (1611) | (1651) |
| GFTFSNFG | ISGGGRDT | VKWGNIYFDY | LSINTF (1655) | AAS | QQSSNTPFT |
| (1652) | (1653) | (1654) | | (1611) | (1656) |
| GFTFDDYG | ISWNDGKT | ARDWQYLIERYF | QSVSSSY (1639) | GAS | QQYGSSPWT |
| (1657) | (1658) | DY (1659) | | (1640) | (1641) |
| GFTFDDYG | IGWTGGRS | ARDRQWLVQWYF | QSISSY (1610) | AAS | QQSYSTPPIT |
| (1657) | (1660) | DY (1661) | | (1611) | (1612) |
| GFTFDDYG | ISWNDGKT | ARDWQYLIDRYF | | | |
| (1657) | (1658) | DF (1662) | | | |
| GFTFDDYA | IGWSSGSI | AKAYTFMITLYF | | | |
| (1642) | (1663) | DY (1664) | | | |
| GFTFDDYD | SGWNRGSL | AKGFVVVSAAYF | | | |
| (1665) | (1666) | DY (1667) | | | |
| GVTFRNFA | IIPFFSAA | AREGERGHTYGF | | | |
| (1668) | (1669) | DY (1670) | | | |
| GFTFDDYA | INWNRGRT | AKAEQWLDEGYF | | | |
| (1642) | (1671) | DY (1672) | | | |
| GFTFEDYA | ISDSGGST | AKDQGGSYPYYF | | | |
| (1673) | (1674) | HY (1609) | | | |
| GYTFTSFY | IGWSNVKI | VKAYTSMLTLYF | | | |
| (1675) | (1676) | DY (1677) | | | |
| GGSISSYH | INPSDGST | ARRVAGDIFDI | | | |
| (1678) | (1679) | (1680) | | | |
| GFTFEDYG | IYYIGST | ARVPVGATGASD | | | |
| (1681) | (1682) | V (1683) | | | |
| GFTFSAYA | ISWTGGNT | TRDRQWLMQWYF | | | |
| (1684) | (1685) | DY (1686) | | | |
| GFALHDYA | ISYGGSDK | AKSAHWNFFFDY | | | |
| (1687) | (1688) | (1689) | | | |
| GDSISSTA | ISWNSGVI | AKGSGSYYVSWF | | | |
| YH | (1717) | DP (1718) | | | |
| (1687) | | | | | |
| GFTFSTYA | ITYNGNT | ARHLGYNSDFFP | | | |
| (1690) | (1691) | FDF (1692) | | | |
| | IGGSGDST | VKVRNYDGSFDI | | | |
| | (1693) | (1694) | | | |

Group R

| | | | | | |
|---|---|---|---|---|---|
| SYGMS | TMSGGGRDIYYPD | QYYDDWFAY | RASQSISNNLH | YASQSIS | QQSNSWPLT |
| (1751) | SMKG (1752) | (1753) | (1754) | (1755) | (1756) |
| TYGVH | VIWSGGSTDYNAA | EKSVYGNYVGAM | KASQSVSDDVA | YAFNRYT | QQDYRSPWT |
| (1757) | FIS (1758) | DY (1759) | (1760) | (1761) | (1762) |
| SYGMS | TISGGGRDIYYPD | QYYDDWFAY | RASQSISNDLH | YVSQSIS | QQSDSWPLT |
| (1751) | SVKG (1763) | (1753) | (1764) | (1765) | (1766) |
| SDYAWN | YISYSGYTSYNPS | SLDYDYGTMDY | RANSSVSSMH | AISNLAF | QQWSSRPPT |
| (1767) | LKS (1768) | (1769) | (1770) | (1771) | (1772) |
| SYDMS | TISGGGSYTYYQD | PYGPYFDY | HASQSINVWLS | ASNLHT | QQGQSYPWT |
| (1773) | SVKG (1774) | (1775) | (1776) | (1777) | (1778) |
| SDYAWN | YISYSGYTSYNPS | SLDYDYGTMDY | RANSSVSSMH | AISNLAF | QQWNSRPPT |
| (1767) | LKS (1768) | (1769) | (1770) | (1771) | (1779) |
| YYDMS | TISGGGRNTYFID | PYEGAVDF | KASQDVDNAVA | WASTRHH | QQYSTFPYT |
| (1780) | SVKG (1781) | (1782) | (1783) | (1784) | (1785) |
| SYGMS | TISGGGRDTYYLD | QYYDDWFAY | RASQSLSNNLH | YASQSIS | QQSNSWPLT |
| (1751) | SVKG (1786) | (1753) | (1787) | (1755) | (1756) |
| NNWIG | DFYPGGGYTNYNE | GYGTNYWYFDV | KASQSVSNDVA | YAFTRYI | QQDYSSPYT |
| (1788) | KFKG (1789) | (1790) | (1791) | (1792) | (1793) |
| NFGMN | WISGYTREPTYAA | DVFDY (1796) | RASESVDNYGYSFMN | RASNLES | QQSNADPT |
| (1794) | DFKG (1795) | | (1797) | (1798) | (1799) |

Group T

| | | | | | |
|---|---|---|---|---|---|
| GYTFTSYY | GVNPSNGGTNFNE | RDYRYDMGFDY | RASKGVSTSGYSYLH | LASYLE | QHSRELPLT |
| MY | KFKS (1801) | (1802) | (1803) | (1804) | (1805) |
| (1800) | | | | | |
| GYTFTNYY | GINPSNGGTNYNE | RDYRYDMGFDY | | | |
| MY | KFKN (890) | (1802) | | | |
| (1806) | | | | | |

Group U

| | | | | | |
|---|---|---|---|---|---|
| G | W (I/V) S A | (Q/—) GY | S G D A L | | Q Q |
| (T/R/I) | (Y/H) N G N T | (G/D)(N/V)Y | (P/T/S) | | (N/S/W) |
| (F/L) | (K/N) Y A Q K | (L/S)(Y/W) | (M/T/E/K) Q Y | | (Y/K/I) |
| (S/E/ | L Q G (1882) | (D/A)(Y/V) | (G/A) Y (1884) | | (N/E/S) |
| T/P/R) | | (1883) | | | (S/V/D/T) |
| (T/S/ | | | | | P (Y/W) T |
| H/Q/R/ | | | | | (1885) |
| W) | | | | | |
| (F/Y/Q) | | | | | |
| (1881) | | | | | |
| (T/R/W/Q/ | (T/A) I S G | D | | | |
| H/S) | (S/G) G | (A/V/S)(D/E) Y | | | |
| (Y/F/Q) | (S/G).(S/D/N) | (S/G/R)(S/L/ | | | |
| G (M/I) | T Y Y (A/P/S) | T) (1888), | | | |
| (1886) | D S V (K/Q) G | with the | | | |
| | (1887) | proviso that | | | |
| | | if A at | | | |
| | | position 2, | | | |
| | | then not D | | | |
| | | or S in | | | |
| | | position 5 | | | |
| | | GYALDY | | | |
| | | (2038) | | | |
| GYIFSSY | FPGSGS (1890) | GYGNYLYFDV | KASQSVSDDVA | YAFKRYI | QQNYNSPYT |
| (1889) | | (1891) | (1760) | (1892) | (1893) |
| SYWIG | KIFPGSGSADYNE | DSEYSSGSGY | SGDALTTQYAY | KDTERPS | QSADNSITYR |
| (1894) | NFKG (1895) | (1896) | (1897) | (872) | V (876) |
| | | QRDSAWFAS | RASESVDNSGISFMS | ATSKLAS | QQWISDPWT |
| | | (2039) | (1898) | (1899) | (1900) |
| | | | SGDALSEQYAY | TASNQGS | QQSKEVPWT |
| | | | (1901) | (1902) | (840) |
| | | | SGDALPKQYAY | | |
| | | | (869) | | |
| | | | SGDALPMQYGY | | |
| | | | (1903) | | |
| | | | RTSSSVNYMH | | |
| | | | (1904) | | |
| GYRFTWY | SAYNGN (1906) | DVDYSSGSGY | | | |
| (1905) | | (1907) | | | |
| WYGIS | WISAYNGNTNYAQ | DAEYSLGSGY | | | |
| (1908) | KLQG (861) | (1909) | | | |
| GYRFSTF | SAHNGN (1911) | DAEYGSGSGY | | | |
| (1910) | | (1912) | | | |
| TFGIS | WVSAHNGNTNYAQ | DADYGSGSGY | | | |
| (1913) | KLQG (1914) | (1915) | | | |
| GYRFETY | SYSGR (1917) | DVDYGTGSGY | | | |
| (1916) | | (1918) | | | |
| GYRFRQY | YISYSGRTSYNPS | DVDYGSGSGY | | | |
| (1919) | LTS (1920) | (1921) | | | |
| QYGIS | SGGGSD (1923) | DAEYGSGSGY | | | |
| (1922) | | (1912) | | | |
| GYRFTRY | TISGGGSDTYYPD | GYALDY | | | |
| (1924) | SVQG (1925) | (2038) | | | |
| RYGIS | | QGYDVYSWFAY | | | |
| (1926) | | (1927) | | | |
| GYRFPHY | | | | | |
| (1928) | | | | | |
| HYGIS | | | | | |
| (1929) | | | | | |
| GYRFTRQ | | | | | |
| (1930) | | | | | |
| RQGIS | | | | | |
| (1931) | | | | | |
| GHSITSDY | | | | | |
| (1932) | | | | | |
| SDYAWN | | | | | |
| (1767) | | | | | |
| GFTFSTF | | | | | |
| (1933) | | | | | |
| TFGMS | | | | | |
| (1934) | | | | | |

Group V

| | | | | | |
|---|---|---|---|---|---|
| GWSLTGPG | IYGDGST | AYEYAMDW | WSVSTSGKSY | LLS | YHIRDLT |
| (1935) | (1936) | (1937) | (1938) | (1939) | (2040) |

Group W

| | | | | | |
|---|---|---|---|---|---|
| GYTFTSYW | YPGSSL (1941) | LSTGTFAY | KSSQSLWDSTNQKNFL | WTSTRES | QNDYFYPLT |
| IN | | (1942) | T (1943) | (1944) | (1945) |
| (1940) | | | | | |
| GYTFTSY | NIYPGSSLTNYNE | LTTGTFAY | KSSQSLWDSGNQKNFL | WTSYRES | QNDYFYPHT |
| (1946) | KFKN (1947) | (1948) | T (1949) | (1950) | (1951) |
| SYWIN | YPGSSI (1953) | LLTGTFAY | KSSQSLLDSGNQKNFL | WTS | QNDYSYPLT |
| (1952) | | (1954) | T (1955) | (T/Y) | (1957) |
| | | | | RES | |
| | | | | (1956) | |
| | NIYPGSSITNYNE | L(L/S)TGTFAY | KSSQSL(W/L)DS(G/ | | QNDY(F/S)Y |
| | KFKN (1958) | (1959) | T)NQKNFLT (1960) | | P(L/H)T |
| | | | | | (1961) |
| | WPGSSL (1962) | | | | |
| | NIWPGSSLTNYNE | | | | |
| | KFKN (1963) | | | | |
| | NIYPGSSSTNYNE | | | | |
| | KFKN (1964) | | | | |
| | NI(Y/W)PGSS | | | | |
| | (L/I/S)TNYNEK | | | | |
| | FKN (1965) | | | | |

Group X

| | | | | | |
|---|---|---|---|---|---|
| GLTFSSSG | IWYDGSKR | ATNNDY | RASQSVSSYLA | TASNRAT | QQYSNWPRT |
| (1966) | (1706) | (1967) | (704) | (1968) | (1969) |

[0585] The ABs in the activatable antibodies of the disclosure specifically bind a PD-1 target, such as, for example, mammalian PD-1. In some embodiments, such Abs bind mammalian PD-1. In some embodiments, such Abs bind human PD-1. In some embodiments, such Abs bind non-human primate PD-1. Also included in the disclosure are ABs that bind to the same PD-1 epitope as an antibody of the disclosure and/or an activated activatable antibody described herein. Also included in the disclosure are ABs that compete with an anti-PD-1 antibody and/or an activated anti-PD-1 activatable antibody described herein for binding to a PD-1 target, e.g., human PD-1. Also included in the disclosure are ABs that cross-compete with an anti-PD-1 antibody and/or an activated anti-PD-1 activatable antibody described herein for binding to a PD-1 target, e.g., human PD-1.

[0586] The activatable anti-PD-1 antibodies provided herein include a masking moiety. In some embodiments, the masking moiety is an amino acid sequence that is coupled or otherwise attached to the anti-PD-1 antibody and is positioned within the activatable anti-PD-1 antibody construct such that the masking moiety reduces the ability of the anti-PD-1 antibody to specifically bind PD-1. Suitable masking moieties are identified using any of a variety of known techniques. For example, peptide masking moieties are identified using the methods described in PCT Publication No. WO 2009/025846 by Daugherty et al., the contents of which are hereby incorporated by reference in their entirety.

[0587] The activatable anti-PD-1 antibodies provided herein include a cleavable moiety. In some embodiments, the cleavable moiety includes an amino acid sequence that is a substrate for a protease, usually an extracellular protease. Suitable substrates are identified using any of a variety of known techniques. For example, peptide substrates are identified using the methods described in U.S. Pat. No. 7,666,817 by Daugherty et al.; in U.S. Pat. No. 8,563,269 by Stagliano et al.; and in PCT Publication No. WO 2014/026136 by La Porte et al., the contents of each of which are hereby incorporated by reference in their entirety. (See also Boulware et al. “Evolutionary optimization of peptide substrates for proteases that exhibit rapid hydrolysis kinetics.” Biotechnol Bioeng. 106.3 (2010): 339-46).

[0588] Exemplary substrates include but are not limited to substrates cleavable by one or more of the following enzymes or proteases listed in Table 3.

TABLE 3
Exemplary Proteases and/or Enzymes

| | | |
|---|---|---|
| ADAMS, ADAMTS, e.g. | Cysteine proteinases, e.g., | Serine proteases, e.g., |
| ADAM8 | Cruzipain | activated protein C |
| ADAM9 | Legumain | Cathepsin A |
| ADAM 10 | Otubain-2 | Cathepsin G |
| ADAM12 | KLKs, e.g., | Chymase |
| ADAM15 | KLK4 | coagulation factor proteases |
| ADAM17/TACE | KLK5 | (e.g., FVIIa, FIXa, FXa, FXIa, |
| ADAMDEC1 | KLK6 | FXIIa) |
| ADAMTS1 | KLK7 | Elastase |
| ADAMTS4 | KLK8 | Granzyme B |
| ADAMTS5 | KLK10 | Guanidinobenzoatase |
| Aspartate proteases, e.g., | KLK11 | HtrA1 |
| BACE | KLK13 | Human Neutrophil Elastase |
| Renin | KLK14 | Lactoferrin |
| Aspartic cathepsins, e.g., | Metallo proteinases, e.g., | Marapsin |
| Cathepsin D | Meprin | NS3/4A |
| Cathepsin E | Neprilysin | PACE4 |
| Caspases, e.g., | PSMA | Plasmin |
| Caspase 1 | BMP-1 | PSA |
| Caspase 2 | MMPs, e.g., | tPA |
| Caspase 3 | MMP1 | Thrombin |
| Caspase 4 | MMP2 | Tryptase |
| Caspase 5 | MMP3 | uPA |
| Caspase 6 | MMP7 | Type II Transmembrane |
| Caspase 7 | MMP8 | Serine Proteases (TTSPs), e.g., |
| Caspase 8 | MMP9 | DESC1 |
| Caspase 9 | MMP10 | DPP-4 |
| Caspase 10 | MMP11 | FAP |
| Caspase 14 | MMP12 | Hepsin |
| Cysteine cathepsins, e.g., | MMP13 | Matriptase-2 |
| Cathepsin B | MMP14 | MT-SP1/Matriptase |
| Cathepsin C | MMP15 | TMPRSS2 |
| Cathepsin K | MMP16 | TMPRSS3 |
| Cathepsin L | MMP17 | TMPRSS4 |
| Cathepsin S | MMP19 | |
| Cathepsin V/L2 | MMP20 | |
| Cathepsin X/Z/P | MMP23 | |
| | MMP24 | |
| | MMP26 | |
| | MMP27 | |

[0589] The activatable anti-PD-1 antibodies described herein overcome a limitation of antibody therapeutics, particularly antibody therapeutics that are known to be toxic to at least some degree in vivo. Target-mediated toxicity constitutes a major limitation for the development of therapeutic antibodies. The activatable anti-PD-1 antibodies provided herein are designed to address the toxicity associated with the inhibition of the target in normal tissues by traditional therapeutic antibodies. These activatable anti-PD-1 antibodies remain masked until proteolytically activated at the site of disease. Starting with an anti-PD-1 antibody as a parental therapeutic antibody, the activatable anti-PD-1 antibodies of the invention were engineered by coupling the antibody to an inhibitory mask through a linker that incorporates a protease substrate.

[0590] When the AB is modified with a MM and is in the presence of the target, specific binding of the AB to its target is reduced or inhibited, as compared to the specific binding of the AB not modified with an MM or the specific binding of the parental AB to the target.

[0591] The K_{d} of the AB modified with a MM towards the target is at least 5, 10, 25, 50, 100, 250, 500, 1,000, 2,500, 5,000, 10,000, 50,000, 100,000, 500,000, 1,000,000, 5,000,000, 10,000,000, 50,000,000 or greater, or between 5-10, 10-100, 10-1,000, 10-10,000, 10-100,000, 10-1,000,000, 10-10,000,000, 100-1,000, 100-10,000, 100-100,000, 100-1,000,000, 100-10,000,000, 1,000-10,000, 1,000-100,000, 1,000-1,000,000, 1000-10,000,000, 10,000-100,000, 10,000-1,000,000, 10,000-10,000,000, 100,000-1,000,000, or 100,000-10,000,000 times greater than the K_{d} of the AB not modified with an MM or of the parental AB towards the target. Conversely, the binding affinity of the AB modified with a MM towards the target is at least 2, 3, 4, 5, 10, 25, 50, 100, 250, 500, 1,000, 2,500, 5,000, 10,000, 50,000, 100,000, 500,000, 1,000,000, 5,000,000, 10,000,000, 50,000,000 or greater, or between 5-10, 10-100, 10-1,000, 10-10,000, 10-100,000, 10-1,000,000, 10-10,000,000, 100-1,000, 100-10,000, 100-100,000, 100-1,000,000, 100-10,000,000, 1,000-10,000, 1,000-100,000, 1,000-1,000,000, 1000-10,000,000, 10,000-100,000, 10,000-1,000,000, 10,000-10,000,000, 100,000-1,000,000, or 100,000-10,000,000 times lower than the binding affinity of the AB not modified with an MM or of the parental AB towards the target.

[0592] In some embodiments, the dissociation constant (K_{d}) of the MM towards the AB is generally greater than the K_{d} of the AB towards the target. The K_{d} of the MM towards the AB can be at least 5, 10, 25, 50, 100, 250, 500, 1,000, 2,500, 5,000, 10,000, 100,000, 1,000,000 or even 10,000,000 times greater than the K_{d} of the AB towards the target. Conversely, the binding affinity of the MM towards the AB is generally lower than the binding affinity of the AB towards the target. The binding affinity of M1V1 towards the AB can be at least 5, 10, 25, 50, 100, 250, 500, 1,000, 2,500, 5,000, 10,000, 100,000, 1,000,000 or even 10,000,000 times lower than the binding affinity of the AB towards the target.

[0593] In some embodiments, the dissociation constant (K_{d}) of the MM towards the AB is approximately equal to the K_{d} of the AB towards the target. In some embodiments, the dissociation constant (K_{d}) of the MM towards the AB is no more than the dissociation constant of the AB towards the target.

[0594] In some embodiments, the dissociation constant (K_{d}) of the MM towards the AB is less than the dissociation constant of the AB towards the target.

[0595] In some embodiments, the dissociation constant (K_{d}) of the MM towards the AB is greater than the dissociation constant of the AB towards the target.

[0596] In some embodiments, the MM has a K_{d} for binding to the AB that is no more than the K_{d} for binding of the AB to the target.

[0597] In some embodiments, the MM has a K_{d} for binding to the AB that is no less than the K_{d} for binding of the AB to the target.

[0598] In some embodiments, the MM has a K_{d} for binding to the AB that is approximately equal to the K_{d} for binding of the AB to the target.

[0599] In some embodiments, the MM has a K_{d} for binding to the AB that is less than the K_{d} for binding of the AB to the target.

[0600] In some embodiments, the MM has a K_{d} for binding to the AB that is greater than the K_{d} for binding of the AB to the target.

[0601] In some embodiments, the MM has a K_{d} for binding to the AB that is no more than 2, 3, 4, 5, 10, 25, 50, 100, 250, 500, or 1,000 fold greater than the K_{d} for binding of the AB to the target. In some embodiments, the MM has a K_{d} for binding to the AB that is between 1-5, 2-5, 2-10, 5-10, 5-20, 5-50, 5-100, 10-100, 10-1,000, 20-100, 20-1000, or 100-1,000 fold greater than the K_{d} for binding of the AB to the target.

[0602] In some embodiments, the MM has an affinity for binding to the AB that is less than the affinity of binding of the AB to the target.

[0603] In some embodiments, the MM has an affinity for binding to the AB that is no more than the affinity of binding of the AB to the target.

[0604] In some embodiments, the MM has an affinity for binding to the AB that is approximately equal of the affinity of binding of the AB to the target.

[0605] In some embodiments, the MM has an affinity for binding to the AB that is no less than the affinity of binding of the AB to the target.

[0606] In some embodiments, the MM has an affinity for binding to the AB that is greater than the affinity of binding of the AB to the target.

[0607] In some embodiments, the MM has an affinity for binding to the AB that is 2, 3, 4, 5, 10, 25, 50, 100, 250, 500, or 1,000 less than the affinity of binding of the AB to the target. I In some embodiments, the MM has an affinity for binding to the AB that is between 1-5, 2-5, 2-10, 5-10, 5-20, 5-50, 5-100, 10-100, 10-1,000, 20-100, 20-1000, or 100-1,000 fold less than the affinity of binding of the AB to the target. In some embodiments, the MM has an affinity for binding to the AB that is 2 to 20 fold less than the affinity of binding of the AB to the target. In some embodiments, a MM not covalently linked to the AB and at equimolar concentration to the AB does not inhibit the binding of the AB to the target.

[0608] When the AB is modified with a MM and is in the presence of the target specific binding of the AB to its target is reduced or inhibited, as compared to the specific binding of the AB not modified with an MM or the specific binding of the parental AB to the target. When compared to the binding of the AB not modified with an MM or the binding of the parental AB to the target the AB's ability to bind the target when modified with an MM can be reduced by at least 50%, 60%, 70%, 80%, 90%, 92%, 93%, 94%, 95%, 96%, 97%, 98%, 99% and even 100% for at least 2, 4, 6, 8, 12, 28, 24, 30, 36, 48, 60, 72, 84, or 96 hours, or 5, 10, 15, 30, 45, 60, 90, 120, 150, or 180 days, or 1, 2, 3, 4, 5, 6, 7, 8, 9, 10, 11, or 12 months or more when measured in vivo or in an in vitro assay.

[0609] The MM inhibits the binding of the AB to the target. The MM binds the antigen binding domain of the AB and inhibits binding of the AB to the target. The MM can sterically inhibit the binding of the AB to the target. The MM can allosterically inhibit the binding of the AB to its target. In these embodiments when the AB is modified or coupled to a MM and in the presence of target there is no binding or substantially no binding of the AB to the target, or no more than 0.001%, 0.01%, 0.1%, 1%, 2%, 3%, 4%, 5%, 6%, 7%, 8%, 9%, 10%, 15%, 20%, 25%, 30%, 35%, 40%, or 50% binding of the AB to the target, as compared to the binding of the AB not modified with an MM, the parental AB, or the AB not coupled to an MM to the target, for at least 2, 4, 6, 8, 12, 28, 24, 30, 36, 48, 60, 72, 84, or 96 hours, or 5, 10, 15, 30, 45, 60, 90, 120, 150, or 180 days, or 1, 2, 3, 4, 5, 6, 7, 8, 9, 10, 11, or 12 months or longer when measured in vivo or in an in vitro assay.

[0610] When an AB is coupled to or modified by a MM, the MM ‘masks’ or reduces or otherwise inhibits the specific binding of the AB to the target. When an AB is coupled to or modified by a MM, such coupling or modification can effect a structural change that reduces or inhibits the ability of the AB to specifically bind its target.

[0611] An AB coupled to or modified with an MM can be represented by the following formulae (in order from an amino (N) terminal region to carboxyl (C) terminal region:

(MM)-(AB)

(AB)-(MM)

(MM)-L-(AB)

(AB)-L-(MM)

where MM is a masking moiety, the AB is an antibody or antibody fragment thereof, and the L is a linker. In many embodiments, it can be desirable to insert one or more linkers, e.g., flexible linkers, into the composition so as to provide for flexibility.

[0612] In certain embodiments, the MM is not a natural binding partner of the AB. In some embodiments, the MM contains no or substantially no homology to any natural binding partner of the AB. In some embodiments, the MM is no more than 5%, 10%, 15%, 20%, 25%, 30%, 35%, 40%, 45%, 50%, 55%, 60%, 65%, 70%, 75%, or 80% similar to any natural binding partner of the AB. In some embodiments, the MM is no more than 5%, 10%, 15%, 20%, 25%, 30%, 35%, 40%, 45%, 50%, 55%, 60%, 65%, 70%, 75%, or 80% identical to any natural binding partner of the AB. In some embodiments, the MM is no more than 25% identical to any natural binding partner of the AB. In some embodiments, the MM is no more than 50% identical to any natural binding partner of the AB. In some embodiments, the MM is no more than 20% identical to any natural binding partner of the AB. In some embodiments, the MM is no more than 10% identical to any natural binding partner of the AB.

[0613] In some embodiments, the activatable antibodies include an AB that is modified by an MM and also includes one or more cleavable moieties (CM). Such activatable antibodies exhibit activatable/switchable binding, to the AB's target. Activatable antibodies generally include an antibody or antibody fragment (AB), modified by or coupled to a masking moiety (MM) and a modifiable or cleavable moiety (CM). In some embodiments, the CM contains an amino acid sequence that serves as a substrate for at least one protease.

[0614] The elements of the activatable antibodies are arranged so that the MM and CM are positioned such that in a cleaved (or relatively active) state and in the presence of a target, the AB binds a target while the activatable antibody is in an uncleaved (or relatively inactive) state in the presence of the target, specific binding of the AB to its target is reduced or inhibited. The specific binding of the AB to its target can be reduced due to the inhibition or masking of the AB's ability to specifically bind its target by the MM.

[0615] The K_{d} of the AB modified with a MM and a CM towards the target is at least 5, 10, 25, 50, 100, 250, 500, 1,000, 2,500, 5,000, 10,000, 50,000, 100,000, 500,000, 1,000,000, 5,000,000, 10,000,000, 50,000,000 or greater, or between 5-10, 10-100, 10-1,000, 10-10,000, 10-100,000, 10-1,000,000, 10-10,000,000, 100-1,000, 100-10,000, 100-100,000, 100-1,000,000, 100-10,000,000, 1,000-10,000, 1,000-100,000, 1,000-1,000,000, 1000-10,000,000, 10,000-100,000, 10,000-1,000,000, 10,000-10,000,000, 100,000-1,000,000, or 100,000-10,000,000 times greater than the K_{d} of the AB not modified with an MM and a CM or of the parental AB towards the target. Conversely, the binding affinity of the AB modified with a MM and a CM towards the target is at least 5, 10, 25, 50, 100, 250, 500, 1,000, 2,500, 5,000, 10,000, 50,000, 100,000, 500,000, 1,000,000, 5,000,000, 10,000,000, 50,000,000 or greater, or between 5-10, 10-100, 10-1,000, 10-10,000, 10-100,000, 10-1,000,000, 10-10,000,000, 100-1,000, 100-10,000, 100-100,000, 100-1,000,000, 100-10,000,000, 1,000-10,000, 1,000-100,000, 1,000-1,000,000, 1000-10,000,000, 10,000-100,000, 10,000-1,000,000, 10,000-10,000,000, 100,000-1,000,000, or 100,000-10,000,000 times lower than the binding affinity of the AB not modified with an MM and a CM or of the parental AB towards the target.

[0616] When the AB is modified with a MM and a CM and is in the presence of the target but not in the presence of a modifying agent (for example at least one protease), specific binding of the AB to its target is reduced or inhibited, as compared to the specific binding of the AB not modified with an MM and a CM or of the parental AB to the target. When compared to the binding of the parental AB or the binding of an AB not modified with an MM and a CM to its target, the AB's ability to bind the target when modified with an MM and a CM can be reduced by at least 50%, 60%, 70%, 80%, 90%, 92%, 93%, 94%, 95%, 96%, 97%, 98%, 99% and even 100% for at least 2, 4, 6, 8, 12, 28, 24, 30, 36, 48, 60, 72, 84, or 96 hours or 5, 10, 15, 30, 45, 60, 90, 120, 150, or 180 days, or 1, 2, 3, 4, 5, 6, 7, 8, 9, 10, 11, or 12 months or longer when measured in vivo or in an in vitro assay.

[0617] As used herein, the term cleaved state refers to the condition of the activatable antibodies following modification of the CM by at least one protease. The term uncleaved state, as used herein, refers to the condition of the activatable antibodies in the absence of cleavage of the CM by a protease. As discussed above, the term “activatable antibodies” is used herein to refer to an activatable antibody in both its uncleaved (native) state, as well as in its cleaved state. It will be apparent to the ordinarily skilled artisan that in some embodiments a cleaved activatable antibody can lack an MM due to cleavage of the CM by protease, resulting in release of at least the MM (e.g., where the MM is not joined to the activatable antibodies by a covalent bond (e.g., a disulfide bond between cysteine residues).

[0618] By activatable or switchable is meant that the activatable antibody exhibits a first level of binding to a target when the activatable antibody is in a inhibited, masked or uncleaved state (i.e., a first conformation), and a second level of binding to the target in the uninhibited, unmasked and/or cleaved state (i.e., a second conformation), where the second level of target binding is greater than the first level of binding. In general, the access of target to the AB of the activatable antibody is greater in the presence of a cleaving agent capable of cleaving the CM, i.e., a protease, than in the absence of such a cleaving agent. Thus, when the activatable antibody is in the uncleaved state, the AB is inhibited from target binding and can be masked from target binding (i.e., the first conformation is such the AB cannot bind the target), and in the cleaved state the AB is not inhibited or is unmasked to target binding.

[0619] The CM and AB of the activatable antibodies are selected so that the AB represents a binding moiety for a given target, and the CM represents a substrate for a protease. In some embodiments, the protease is co-localized with the target at a treatment site or diagnostic site in a subject. As used herein, co-localized refers to being at the same site or relatively close nearby. In some embodiments, a protease cleaves a CM yielding an activated antibody that binds to a target located nearby the cleavage site. The activatable antibodies disclosed herein find particular use where, for example, a protease capable of cleaving a site in the CM, i.e., a protease, is present at relatively higher levels in or in close proximity to target-containing tissue of a treatment site or diagnostic site than in tissue of non-treatment sites (for example in healthy tissue). In some embodiments, a CM of the disclosure is also cleaved by one or more other proteases. In some embodiments, it is the one or more other proteases that is co-localized with the target and that is responsible for cleavage of the CM in vivo.

[0620] In some embodiments activatable antibodies provide for reduced toxicity and/or adverse side effects that could otherwise result from binding of the AB at non-treatment sites if the AB were not masked or otherwise inhibited from binding to the target.

[0621] In general, an activatable antibody can be designed by selecting an AB of interest and constructing the remainder of the activatable antibody so that, when conformationally constrained, the MM provides for masking of the AB or reduction of binding of the AB to its target. Structural design criteria can be to be taken into account to provide for this functional feature.

[0622] Activatable antibodies exhibiting a switchable phenotype of a desired dynamic range for target binding in an inhibited versus an uninhibited conformation are provided. Dynamic range generally refers to a ratio of (a) a maximum detected level of a parameter under a first set of conditions to (b) a minimum detected value of that parameter under a second set of conditions. For example, in the context of an activatable antibody, the dynamic range refers to the ratio of (a) a maximum detected level of target protein binding to an activatable antibody in the presence of at least one protease capable of cleaving the CM of the activatable antibodies to (b) a minimum detected level of target protein binding to an activatable antibody in the absence of the protease. The dynamic range of an activatable antibody can be calculated as the ratio of the dissociation constant of an activatable antibody cleaving agent (e.g., enzyme) treatment to the dissociation constant of the activatable antibodies cleaving agent treatment. The greater the dynamic range of an activatable antibody, the better the switchable phenotype of the activatable antibody. Activatable antibodies having relatively higher dynamic range values (e.g., greater than 1) exhibit more desirable switching phenotypes such that target protein binding by the activatable antibodies occurs to a greater extent (e.g., predominantly occurs) in the presence of a cleaving agent (e.g., enzyme) capable of cleaving the CM of the activatable antibodies than in the absence of a cleaving agent.

[0623] Activatable antibodies can be provided in a variety of structural configurations. Exemplary formulae for activatable antibodies are provided below. It is specifically contemplated that the N- to C-terminal order of the AB, MM and CM can be reversed within an activatable antibody. It is also specifically contemplated that the CM and MM can overlap in amino acid sequence, e.g., such that the CM is contained within the MM.

[0624] For example, activatable antibodies can be represented by the following formula (in order from an amino (N) terminal region to carboxyl (C) terminal region:

(MM)-(CM)-(AB)

(AB)-(CM)-(MM)

where MM is a masking moiety, CM is a cleavable moiety, and AB is an antibody or fragment thereof. It should be noted that although MM and CM are indicated as distinct components in the formulae above, in all exemplary embodiments (including formulae) disclosed herein it is contemplated that the amino acid sequences of the MM and the CM could overlap, e.g., such that the CM is completely or partially contained within the MM. In addition, the formulae above provide for additional amino acid sequences that can be positioned N-terminal or C-terminal to the activatable antibodies elements.

[0625] In certain embodiments, the MM is not a natural binding partner of the AB. In some embodiments, the MM contains no or substantially no homology to any natural binding partner of the AB. In some embodiments, the MM is no more than 5%, 10%, 15%, 20%, 25%, 30%, 35%, 40%, 45%, 50%, 55%, 60%, 65%, 70%, 75%, or 80% similar to any natural binding partner of the AB. In some embodiments, the MM is no more than 5%, 10%, 15%, 20%, 25%, 30%, 35%, 40%, 45%, 50%, 55%, 60%, 65%, 70%, 75%, or 80% identical to any natural binding partner of the AB. In some embodiments, the MM is no more than 50% identical to any natural binding partner of the AB. In some embodiments, the MM is no more than 25% identical to any natural binding partner of the AB. In some embodiments, the MM is no more than 20% identical to any natural binding partner of the AB. In some embodiments, the MM is no more than 10% identical to any natural binding partner of the AB.

[0626] In many embodiments it can be desirable to insert one or more linkers, e.g., flexible linkers, into the activatable antibody construct so as to provide for flexibility at one or more of the MM-CM junction, the CM-AB junction, or both. For example, the AB, MM, and/or CM may not contain a sufficient number of residues (e.g., Gly, Ser, Asp, Asn, especially Gly and Ser, particularly Gly) to provide the desired flexibility. As such, the switchable phenotype of such activatable antibody constructs can benefit from introduction of one or more amino acids to provide for a flexible linker. In addition, as described below, where the activatable antibody is provided as a conformationally constrained construct, a flexible linker can be operably inserted to facilitate formation and maintenance of a cyclic structure in the uncleaved activatable antibody.

[0627] For example, in certain embodiments an activatable antibody comprises one of the following formulae (where the formula below represent an amino acid sequence in either N- to C-terminal direction or C- to N-terminal direction):

(MM)-L1-(CM)-(AB)

(MM)-(CM)-L2-(AB)

(MM)-L1-(CM)-L2-(AB)

wherein MM, CM, and AB are as defined above; wherein L1 and L2 are each independently and optionally present or absent, are the same or different flexible linkers that include at least 1 flexible amino acid (e.g., Gly). In addition, the formulae above provide for additional amino acid sequences that can be positioned N-terminal or C-terminal to the activatable antibodies elements. Examples include, but are not limited to, targeting moieties (e.g., a ligand for a receptor of a cell present in a target tissue) and serum half-life extending moieties (e.g., polypeptides that bind serum proteins, such as immunoglobulin (e.g., IgG) or serum albumin (e.g., human serum albumin (HAS)).

[0628] The CM is specifically cleaved by at least one protease at a rate of about 0.001-1500×10⁴ M⁻¹S⁻¹ or at least 0.001, 0.005, 0.01, 0.05, 0.1, 0.5, 1, 2.5, 5, 7.5, 10, 15, 20, 25, 50, 75, 100, 125, 150, 200, 250, 500, 750, 1000, 1250, or 1500×10⁴ M⁻¹S⁻¹. In some embodiments, the CM is specifically cleaved at a rate of about 100,000 M'S′. In some embodiments, the CM is specifically cleaved at a rate from about 1×10E2 to about 1×10E6 M⁻¹S⁻¹ (i.e., from about 1×10² to about 1×10⁶ M⁻¹S⁻¹).

[0629] For specific cleavage by an enzyme, contact between the enzyme and CM is made. When the activatable antibody comprising an AB coupled to a MM and a CM is in the presence of target and sufficient enzyme activity, the CM can be cleaved. Sufficient enzyme activity can refer to the ability of the enzyme to make contact with the CM and effect cleavage. It can readily be envisioned that an enzyme can be in the vicinity of the CM but unable to cleave because of other cellular factors or protein modification of the enzyme.

[0630] Linkers suitable for use in compositions described herein are generally ones that provide flexibility of the modified AB or the activatable antibodies to facilitate the inhibition of the binding of the AB to the target. Such linkers are generally referred to as flexible linkers. Suitable linkers can be readily selected and can be of any of a suitable of different lengths, such as from 1 amino acid (e.g., Gly) to 20 amino acids, from 2 amino acids to 15 amino acids, from 3 amino acids to 12 amino acids, including 4 amino acids to 10 amino acids, 5 amino acids to 9 amino acids, 6 amino acids to 8 amino acids, or 7 amino acids to 8 amino acids, and can be 1, 2, 3, 4, 5, 6, 7, 8, 9, 10, 11, 12, 13, 14, 15, 16, 17, 18, 19, or 20 amino acids in length.

[0631] Exemplary flexible linkers include glycine polymers (G)n, glycine-serine polymers (including, for example, (GS)n, (GSGGS)n (SEQ ID NO: 363) and (GGGS)n (SEQ ID NO: 364), where n is an integer of at least one), glycine-alanine polymers, alanine-serine polymers, and other flexible linkers known in the art. Glycine and glycine-serine polymers are relatively unstructured, and therefore can be able to serve as a neutral tether between components. Glycine accesses significantly more phi-psi space than even alanine, and is much less restricted than residues with longer side chains (see Scheraga, Rev. Computational Chem. 11173-142 (1992)). Exemplary flexible linkers include, but are not limited to GGSG (SEQ ID NO: 365), GGSGG (SEQ ID NO: 366), GSGSG (SEQ ID NO: 367), GSGGG (SEQ ID NO: 368), GGGSG (SEQ ID NO: 369), GSSSG (SEQ ID NO: 370), and the like. The ordinarily skilled artisan will recognize that design of an activatable antibodies can include linkers that are all or partially flexible, such that the linker can include a flexible linker as well as one or more portions that confer less flexible structure to provide for a desired activatable antibodies structure.

[0632] The disclosure also provides compositions and methods that include an activatable anti-PD-1 antibody that includes an antibody or antibody fragment (AB) that specifically binds PD-1, where the AB is coupled to a masking moiety (MM) that decreases the ability of the AB to bind its target. In some embodiments, the activatable anti-PD-1 antibody further includes a cleavable moiety (CM) that is a substrate for a protease. The compositions and methods provided herein enable the attachment of one or more agents to one or more cysteine residues in the AB without compromising the activity (e.g., the masking, activating or binding activity) of the activatable anti-PD-1 antibody. In some embodiments, the compositions and methods provided herein enable the attachment of one or more agents to one or more cysteine residues in the AB without reducing or otherwise disturbing one or more disulfide bonds within the MM. The compositions and methods provided herein produce an activatable anti-PD-1 antibody that is conjugated to one or more agents, e.g., any of a variety of therapeutic, diagnostic and/or prophylactic agents, for example, in some embodiments, without any of the agent(s) being conjugated to the MM of the activatable anti-PD-1 antibody. The compositions and methods provided herein produce conjugated activatable anti-PD-1 antibodies in which the MM retains the ability to effectively and efficiently mask the AB of the activatable antibody in an uncleaved state. The compositions and methods provided herein produce conjugated activatable anti-PD-1 antibodies in which the activatable antibody is still activated, i.e., cleaved, in the presence of a protease that can cleave the CM.

[0633] The activatable anti-PD-1 antibodies have at least one point of conjugation for an agent, but in the methods and compositions provided herein less than all possible points of conjugation are available for conjugation to an agent. In some embodiments, the one or more points of conjugation are sulfur atoms involved in disulfide bonds. In some embodiments, the one or more points of conjugation are sulfur atoms involved in interchain disulfide bonds. In some embodiments, the one or more points of conjugation are sulfur atoms involved in interchain sulfide bonds, but not sulfur atoms involved in intrachain disulfide bonds. In some embodiments, the one or more points of conjugation are sulfur atoms of cysteine or other amino acid residues containing a sulfur atom. Such residues can occur naturally in the antibody structure or can be incorporated into the antibody by site-directed mutagenesis, chemical conversion, or mis-incorporation of non-natural amino acids.

[0634] Also provided are methods of preparing a conjugate of an activatable anti-PD-1 antibody having one or more interchain disulfide bonds in the AB and one or more intrachain disulfide bonds in the MM, and a drug reactive with free thiols is provided. The method generally includes partially reducing interchain disulfide bonds in the activatable antibody with a reducing agent, such as, for example, TCEP; and conjugating the drug reactive with free thiols to the partially reduced activatable antibody. As used herein, the term partial reduction refers to situations where an activatable anti-PD-1 antibody is contacted with a reducing agent and less than all disulfide bonds, e.g., less than all possible sites of conjugation are reduced. In some embodiments, less than 99%, 98%, 97%, 96%, 95%, 90%, 85%, 80%, 75%, 70%, 65%, 60%, 55%, 50%, 45%, 40%, 35%, 30%, 25%, 20%, 15%, 10% or less than 5% of all possible sites of conjugation are reduced.

[0635] In yet other embodiments, a method of reducing and conjugating an agent, e.g., a drug, to an activatable anti-PD-1 antibody resulting in selectivity in the placement of the agent is provided. The method generally includes partially reducing the activatable anti-PD-1 antibody with a reducing agent such that any conjugation sites in the masking moiety or other non-AB portion of the activatable antibody are not reduced, and conjugating the agent to interchain thiols in the AB. The conjugation site(s) are selected so as to allow desired placement of an agent to allow conjugation to occur at a desired site. The reducing agent is, for example, TCEP. The reduction reaction conditions such as, for example, the ratio of reducing agent to activatable antibody, the length of incubation, the temperature during the incubation, the pH of the reducing reaction solution, etc., are determined by identifying the conditions that produce a conjugated activatable antibody in which the MM retains the ability to effectively and efficiently mask the AB of the activatable antibody in an uncleaved state. The ratio of reduction agent to activatable anti-PD-1 antibody will vary depending on the activatable antibody. In some embodiments, the ratio of reducing agent to activatable anti-PD-1 antibody will be in a range from about 20:1 to 1:1, from about 10:1 to 1:1, from about 9:1 to 1:1, from about 8:1 to 1:1, from about 7:1 to 1:1, from about 6:1 to 1:1, from about 5:1 to 1:1, from about 4:1 to 1:1, from about 3:1 to 1:1, from about 2:1 to 1:1, from about 20:1 to 1:1.5, from about 10:1 to 1:1.5, from about 9:1 to 1:1.5, from about 8:1 to 1:1.5, from about 7:1 to 1:1.5, from about 6:1 to 1:1.5, from about 5:1 to 1:1.5, from about 4:1 to 1:1.5, from about 3:1 to 1:1.5, from about 2:1 to 1:1.5, from about 1.5:1 to 1:1.5, or from about 1:1 to 1:1.5. In some embodiments, the ratio is in a range of from about 5:1 to 1:1. In some embodiments, the ratio is in a range of from about 5:1 to 1.5:1. In some embodiments, the ratio is in a range of from about 4:1 to 1:1. In some embodiments, the ratio is in a range from about 4:1 to 1.5:1. In some embodiments, the ratio is in a range from about 8:1 to about 1:1. In some embodiments, the ratio is in a range of from about 2.5:1 to 1:1.

[0636] In some embodiments, a method of reducing interchain disulfide bonds in the AB of an activatable anti-PD-1 antibody and conjugating an agent, e.g., a thiol-containing agent such as a drug, to the resulting interchain thiols to selectively locate agent(s) on the AB is provided. The method generally includes partially reducing the AB with a reducing agent to form at least two interchain thiols without forming all possible interchain thiols in the activatable antibody; and conjugating the agent to the interchain thiols of the partially reduced AB. For example, the AB of the activatable antibody is partially reduced for about 1 hour at about 37° C. at a desired ratio of reducing agent:activatable antibody. In some embodiments, the ratio of reducing agent to activatable antibody will be in a range from about 20:1 to 1:1, from about 10:1 to 1:1, from about 9:1 to 1:1, from about 8:1 to 1:1, from about 7:1 to 1:1, from about 6:1 to 1:1, from about 5:1 to 1:1, from about 4:1 to 1:1, from about 3:1 to 1:1, from about 2:1 to 1:1, from about 20:1 to 1:1.5, from about 10:1 to 1:1.5, from about 9:1 to 1:1.5, from about 8:1 to 1:1.5, from about 7:1 to 1:1.5, from about 6:1 to 1:1.5, from about 5:1 to 1:1.5, from about 4:1 to 1:1.5, from about 3:1 to 1:1.5, from about 2:1 to 1:1.5, from about 1.5:1 to 1:1.5, or from about 1:1 to 1:1.5. In some embodiments, the ratio is in a range of from about 5:1 to 1:1. In some embodiments, the ratio is in a range of from about 5:1 to 1.5:1. In some embodiments, the ratio is in a range of from about 4:1 to 1:1. In some embodiments, the ratio is in a range from about 4:1 to 1.5:1. In some embodiments, the ratio is in a range from about 8:1 to about 1:1. In some embodiments, the ratio is in a range of from about 2.5:1 to 1:1.

[0637] The thiol-containing reagent can be, for example, cysteine or N-acetyl cysteine. The reducing agent can be, for example, TCEP. In some embodiments, the reduced activatable antibody can be purified prior to conjugation, using for example, column chromatography, dialysis, or diafiltration. Alternatively, the reduced antibody is not purified after partial reduction and prior to conjugation.

[0638] The invention also provides partially reduced activatable anti-PD-1 antibodies in which at least one interchain disulfide bond in the activatable antibody has been reduced with a reducing agent without disturbing any intrachain disulfide bonds in the activatable antibody, wherein the activatable antibody includes an antibody or an antigen binding fragment thereof (AB) that specifically binds to PD-1, a masking moiety (MINI) that inhibits the binding of the AB of the activatable antibody in an uncleaved state to the PD-1 target, and a cleavable moiety (CM) coupled to the AB, wherein the CM is a polypeptide that functions as a substrate for a protease. In some embodiments the MM is coupled to the AB via the CM. In some embodiments, one or more intrachain disulfide bond(s) of the activatable antibody is not disturbed by the reducing agent. In some embodiments, one or more intrachain disulfide bond(s) of the MM within the activatable antibody is not disturbed by the reducing agent. In some embodiments, the activatable antibody in the uncleaved state has the structural arrangement from N-terminus to C-terminus as follows: MM-CM-AB or AB-CM-MM. In some embodiments, reducing agent is TCEP.

[0639] The disclosure also provides partially reduced activatable antibodies in which at least one interchain disulfide bond in the activatable antibody has been reduced with a reducing agent without disturbing any intrachain disulfide bonds in the activatable antibody, wherein the activatable antibody includes an antibody or an antigen binding fragment thereof (AB) that specifically binds to the target, e.g., PD-1, a masking moiety (MINI) that inhibits the binding of the AB of the activatable antibody in an uncleaved state to the target, and a cleavable moiety (CM) coupled to the AB, wherein the CM is a polypeptide that functions as a substrate for at least one protease. In some embodiments, the MM is coupled to the AB via the CM. In some embodiments, one or more intrachain disulfide bond(s) of the activatable antibody is not disturbed by the reducing agent. In some embodiments, one or more intrachain disulfide bond(s) of the MM within the activatable antibody is not disturbed by the reducing agent. In some embodiments, the activatable antibody in the uncleaved state has the structural arrangement from N-terminus to C-terminus as follows: MM-CM-AB or AB-CM-MM. In some embodiments, reducing agent is TCEP.

[0640] In some embodiments, the activatable antibodies described herein also include an agent conjugated to the activatable antibody. In some embodiments, the conjugated agent is a therapeutic agent, such as an anti-inflammatory. In such embodiments, the agent is conjugated to a carbohydrate moiety of the activatable antibody, for example, in some embodiments, where the carbohydrate moiety is located outside the antigen-binding region of the antibody or antigen-binding fragment in the activatable antibody. In some embodiments, the agent is conjugated to a sulfhydryl group of the antibody or antigen-binding fragment in the activatable antibody.

[0641] In some embodiments, the agent is a detectable moiety such as, for example, a label or other marker. For example, the agent is or includes a radiolabeled amino acid, one or more biotinyl moieties that can be detected by marked avidin (e.g., streptavidin containing a fluorescent marker or enzymatic activity that can be detected by optical or calorimetric methods), one or more radioisotopes or radionuclides, one or more fluorescent labels, one or more enzymatic labels, and/or one or more chemiluminescent agents. In some embodiments, detectable moieties are attached by spacer molecules.

[0642] Those of ordinary skill in the art will recognize that a large variety of possible moieties can be coupled to the resultant antibodies of the disclosure. (See, for example, “Conjugate Vaccines”, Contributions to Microbiology and Immunology, J. M. Cruse and R. E. Lewis, Jr (eds), Carger Press, New York, (1989), the entire contents of which are incorporated herein by reference).

[0643] Coupling can be accomplished by any chemical reaction that will bind the two molecules so long as the antibody and the other moiety retain their respective activities. This linkage can include many chemical mechanisms, for instance covalent binding, affinity binding, intercalation, coordinate binding and complexation. In some embodiments, the binding is, however, covalent binding. Covalent binding can be achieved either by direct condensation of existing side chains or by the incorporation of external bridging molecules. Many bivalent or polyvalent linking agents are useful in coupling protein molecules, such as the antibodies of the present disclosure, to other molecules. For example, representative coupling agents can include organic compounds such as thioesters, carbodiimides, succinimide esters, diisocyanates, glutaraldehyde, diazobenzenes and hexamethylene diamines. This listing is not intended to be exhaustive of the various classes of coupling agents known in the art but, rather, is exemplary of the more common coupling agents. (See Killen and Lindstrom, Jour. Immun. 133:1335-2549 (1984); Jansen et al., Immunological Reviews 62:185-216 (1982); and Vitetta et al., Science 238:1098 (1987).

[0644] In some embodiments, in addition to the compositions and methods provided herein, the conjugated activatable antibody can also be modified for site-specific conjugation through modified amino acid sequences inserted or otherwise included in the activatable antibody sequence. These modified amino acid sequences are designed to allow for controlled placement and/or dosage of the conjugated agent within a conjugated activatable antibody. For example, the activatable antibody can be engineered to include cysteine substitutions at positions on light and heavy chains that provide reactive thiol groups and do not negatively impact protein folding and assembly, nor alter antigen binding. In some embodiments, the activatable antibody can be engineered to include or otherwise introduce one or more non-natural amino acid residues within the activatable antibody to provide suitable sites for conjugation. In some embodiments, the activatable antibody can be engineered to include or otherwise introduce enzymatically activatable peptide sequences within the activatable antibody sequence.

[0645] Suitable linkers are described in the literature. (See, for example, Ramakrishnan, S. et al., Cancer Res. 44:201-208 (1984) describing use of MBS (M-maleimidobenzoyl-N-hydroxysuccinimide ester). See also, U.S. Pat. No. 5,030,719, describing use of halogenated acetyl hydrazide derivative coupled to an antibody by way of an oligopeptide linker. In some embodiments, suitable linkers include: (i) EDC (1-ethyl-3-(3-dimethylamino-propyl) carbodiimide hydrochloride; (ii) SMPT (4-succinimidyloxycarbonyl-alpha-methyl-alpha-(2-pridyl-dithio)-toluene (Pierce Chem. Co., Cat. (21558G); (iii) SPDP (succinimidyl-6 [3-(2-pyridyldithio) propionamido]hexanoate (Pierce Chem. Co., Cat #21651G); (iv) Sulfo-LC-SPDP (sulfosuccinimidyl 6 [3-(2-pyridyldithio)-propianamide]hexanoate (Pierce Chem. Co. Cat. #2165-G); and (v) sulfo-NHS (N-hydroxysulfo-succinimide: Pierce Chem. Co., Cat. #24510) conjugated to EDC. Additional linkers include, but are not limited to, SMCC, sulfo-SMCC, SPDB, or sulfo-SPDB.

[0646] The linkers described above contain components that have different attributes, thus leading to conjugates with differing physio-chemical properties. For example, sulfo-NHS esters of alkyl carboxylates are more stable than sulfo-NHS esters of aromatic carboxylates. NETS-ester containing linkers are less soluble than sulfo-NHS esters. Further, the linker SMPT contains a sterically hindered disulfide bond, and can form conjugates with increased stability. Disulfide linkages, are in general, less stable than other linkages because the disulfide linkage is cleaved in vitro, resulting in less conjugate available. Sulfo-NHS, in particular, can enhance the stability of carbodimide couplings. Carbodimide couplings (such as EDC) when used in conjunction with sulfo-NHS, forms esters that are more resistant to hydrolysis than the carbodimide coupling reaction alone.

[0647] In some embodiments, the linkers are cleavable. In some embodiments, the linkers are non-cleavable. In some embodiments, two or more linkers are present. The two or more linkers are all the same, i.e., cleavable or non-cleavable, or the two or more linkers are different, i.e., at least one cleavable and at least one non-cleavable.

[0648] The present disclosure utilizes several methods for attaching agents to ABs: (a) attachment to the carbohydrate moieties of the AB, or (b) attachment to sulfhydryl groups of the AB, or (c) attachment to amino groups of the AB, or (d) attachment to carboxylate groups of the AB. According to the disclosure, ABs can be covalently attached to an agent through an intermediate linker having at least two reactive groups, one to react with AB and one to react with the agent. The linker, which can include any compatible organic compound, can be chosen such that the reaction with AB (or agent) does not adversely affect AB reactivity and selectivity. Furthermore, the attachment of linker to agent might not destroy the activity of the agent. Suitable linkers for reaction with oxidized antibodies or oxidized antibody fragments include those containing an amine selected from the group consisting of primary amine, secondary amine, hydrazine, hydrazide, hydroxylamine, phenylhydrazine, semicarbazide and thiosemicarbazide groups. Such reactive functional groups can exist as part of the structure of the linker, or can be introduced by suitable chemical modification of linkers not containing such groups.

[0649] According to the present disclosure, suitable linkers for attachment to reduced ABs include those having certain reactive groups capable of reaction with a sulfhydryl group of a reduced antibody or fragment. Such reactive groups include, but are not limited to: reactive haloalkyl groups (including, for example, haloacetyl groups), p-mercuribenzoate groups and groups capable of Michael-type addition reactions (including, for example, maleimides and groups of the type described by Mitra and Lawton, 1979, J. Amer. Chem. Soc. 101: 3097-3110).

[0650] According to the present disclosure, suitable linkers for attachment to neither oxidized nor reduced Abs include those having certain functional groups capable of reaction with the primary amino groups present in unmodified lysine residues in the Ab. Such reactive groups include, but are not limited to, NHS carboxylic or carbonic esters, sulfo-NHS carboxylic or carbonic esters, 4-nitrophenyl carboxylic or carbonic esters, pentafluorophenyl carboxylic or carbonic esters, acyl imidazoles, isocyanates, and isothiocyanates.

[0651] According to the present disclosure, suitable linkers for attachment to neither oxidized nor reduced Abs include those having certain functional groups capable of reaction with the carboxylic acid groups present in aspartate or glutamate residues in the Ab, which have been activated with suitable reagents. Suitable activating reagents include EDC, with or without added NHS or sulfo-NHS, and other dehydrating agents utilized for carboxamide formation. In these instances, the functional groups present in the suitable linkers would include primary and secondary amines, hydrazines, hydroxylamines, and hydrazides.

[0652] The agent can be attached to the linker before or after the linker is attached to the AB. In certain applications it can be desirable to first produce an AB-linker intermediate in which the linker is free of an associated agent. Depending upon the particular application, a specific agent can then be covalently attached to the linker. In some embodiments, the AB is first attached to the MM, CM and associated linkers and then attached to the linker for conjugation purposes.

[0653] Branched Linkers:

[0654] In specific embodiments, branched linkers that have multiple sites for attachment of agents are utilized. For multiple site linkers, a single covalent attachment to an AB would result in an AB-linker intermediate capable of binding an agent at a number of sites. The sites can be aldehyde or sulfhydryl groups or any chemical site to which agents can be attached.

[0655] In some embodiments, higher specific activity (or higher ratio of agents to AB) can be achieved by attachment of a single site linker at a plurality of sites on the AB. This plurality of sites can be introduced into the AB by either of two methods. First, one can generate multiple aldehyde groups and/or sulfhydryl groups in the same AB. Second, one can attach to an aldehyde or sulfhydryl of the AB a “branched linker” having multiple functional sites for subsequent attachment to linkers. The functional sites of the branched linker or multiple site linker can be aldehyde or sulfhydryl groups, or can be any chemical site to which linkers can be attached. Still higher specific activities can be obtained by combining these two approaches, that is, attaching multiple site linkers at several sites on the AB.

[0656] Cleavable Linkers:

[0657] Peptide linkers that are susceptible to cleavage by enzymes of the complement system, such as but not limited to u-plasminogen activator, tissue plasminogen activator, trypsin, plasmin, or another enzyme having proteolytic activity can be used in one embodiment of the present disclosure. According to one method of the present disclosure, an agent is attached via a linker susceptible to cleavage by complement. The antibody is selected from a class that can activate complement. The antibody-agent conjugate, thus, activates the complement cascade and releases the agent at the target site. According to another method of the present disclosure, an agent is attached via a linker susceptible to cleavage by enzymes having a proteolytic activity such as a u-plasminogen activator, a tissue plasminogen activator, plasmin, or trypsin.

[0658] Non-limiting examples of cleavable linker sequences are provided in Table 5.

TABLE 5
Exemplary Linker Sequences for Conjugation

| Types of Cleavable Sequences | Amino Acid Sequence |
|---|---|
| Plasmin cleavable sequences | |
| Pro-urokinase | PRFKIIGG (SEQ ID NO: 587) |
| | PRFRIIGG (SEQ ID NO: 588) |
| TGFβ | SSRHRRALD (SEQ ID NO: 589) |
| Plasminogen | RKSSIIIRMRDVVL (SEQ ID NO: 590) |
| Staphylokinase | SSSFDKGKYKKGDDA (SEQ ID NO: 591) |
| | SSSFDKGKYKRGDDA (SEQ ID NO: 592) |
| Factor Xa cleavable sequences | IEGR (SEQ ID NO: 593) |
| | IDGR (SEQ ID NO: 594) |
| | GGSIDGR (SEQ ID NO: 595) |
| MMP cleavable sequences | |
| Gelatinase A | PLGLWA (SEQ ID NO: 596) |
| Collagenase cleavable sequences | |
| Calf skin collagen (α1(I) chain) | GPQGIAGQ (SEQ ID NO: 597) |
| Calf skin collagen (α2(I) chain) | GPQGLLGA (SEQ ID NO: 598) |
| Bovine cartilage collagen (α1(II) chain) | GIAGQ (SEQ ID NO: 599) |
| Human liver collagen (α1(III) chain) | GPLGIAGI (SEQ ID NO: 600) |
| Human α₂M | GPEGLRVG (SEQ ID NO: 601) |
| Human PZP | YGAGLGVV (SEQ ID NO: 602) |
| | AGLGVVER (SEQ ID NO: 603) |
| | AGLGISST (SEQ ID NO: 604) |
| Rat α₁M | EPQALAMS (SEQ ID NO: 605) |
| | QALAMSAI (SEQ ID NO: 606) |
| Rat α₂M | AAYHLVSQ (SEQ ID NO: 607) |
| | MDAFLESS (SEQ ID NO: 608) |
| Rat α₁I₃(2J) | ESLPVVAV (SEQ ID NO: 609) |
| Rat α₁I₃(27J) | SAPAVESE (SEQ ID NO: 610) |
| Human fibroblast collagenase | DVAQFVLT (SEQ ID NO: 611) |
| (autolytic cleavages) | VAQFVLTE (SEQ ID NO: 612) |
| | AQFVLTEG (SEQ ID NO: 613) |
| | PVQPIGPQ (SEQ ID NO: 614) |

[0659] In addition, agents can be attached via disulfide bonds (for example, the disulfide bonds on a cysteine molecule) to the AB. Since many tumors naturally release high levels of glutathione (a reducing agent) this can reduce the disulfide bonds with subsequent release of the agent at the site of delivery. In some embodiments, the reducing agent that would modify a CM would also modify the linker of the conjugated activatable antibody.

[0660] Spacers and Cleavable Elements:

[0661] In some embodiments, it can be necessary to construct the linker in such a way as to optimize the spacing between the agent and the AB of the activatable antibody. This can be accomplished by use of a linker of the general structure:

W—(CH₂)n-Q

wherein
W is either —NH—CH₂— or —CH₂—;
Q is an amino acid, peptide; and
n is an integer from 0 to 20.

[0662] In some embodiments, the linker can comprise a spacer element and a cleavable element. The spacer element serves to position the cleavable element away from the core of the AB such that the cleavable element is more accessible to the enzyme responsible for cleavage. Certain of the branched linkers described above can serve as spacer elements.

[0663] Throughout this discussion, it should be understood that the attachment of linker to agent (or of spacer element to cleavable element, or cleavable element to agent) need not be particular mode of attachment or reaction. Any reaction providing a product of suitable stability and biological compatibility is acceptable.

[0664] Serum Complement and Selection of Linkers:

[0665] According to one method of the present disclosure, when release of an agent is desired, an AB that is an antibody of a class that can activate complement is used. The resulting conjugate retains both the ability to bind antigen and activate the complement cascade. Thus, according to this embodiment of the present disclosure, an agent is joined to one end of the cleavable linker or cleavable element and the other end of the linker group is attached to a specific site on the AB. For example, if the agent has an hydroxy group or an amino group, it can be attached to the carboxy terminus of a peptide, amino acid or other suitably chosen linker via an ester or amide bond, respectively. For example, such agents can be attached to the linker peptide via a carbodimide reaction. If the agent contains functional groups that would interfere with attachment to the linker, these interfering functional groups can be blocked before attachment and deblocked once the product conjugate or intermediate is made. The opposite or amino terminus of the linker is then used either directly or after further modification for binding to an AB that is capable of activating complement.

[0666] Linkers (or spacer elements of linkers) can be of any desired length, one end of which can be covalently attached to specific sites on the AB of the activatable antibody. The other end of the linker or spacer element can be attached to an amino acid or peptide linker.

[0667] Thus when these conjugates bind to antigen in the presence of complement the amide or ester bond that attaches the agent to the linker will be cleaved, resulting in release of the agent in its active form. These conjugates, when administered to a subject, will accomplish delivery and release of the agent at the target site, and are particularly effective for the in vivo delivery of pharmaceutical agents, antibiotics, antimetabolites, antiproliferative agents and the like as presented in but not limited to those in Table 5.

[0668] Linkers for Release without Complement Activation:

[0669] In yet another application of targeted delivery, release of the agent without complement activation is desired since activation of the complement cascade will ultimately lyse the target cell. Hence, this approach is useful when delivery and release of the agent should be accomplished without killing the target cell. Such is the goal when delivery of cell mediators such as hormones, enzymes, corticosteroids, neurotransmitters, genes or enzymes to target cells is desired. These conjugates can be prepared by attaching the agent to an AB that is not capable of activating complement via a linker that is mildly susceptible to cleavage by serum proteases. When this conjugate is administered to an individual, antigen-antibody complexes will form quickly whereas cleavage of the agent will occur slowly, thus resulting in release of the compound at the target site.

[0670] Biochemical Cross Linkers:

[0671] In some embodiments, the activatable antibody can be conjugated to one or more therapeutic agents using certain biochemical cross-linkers. Cross-linking reagents form molecular bridges that tie together functional groups of two different molecules. To link two different proteins in a step-wise manner, hetero-bifunctional cross-linkers can be used that eliminate unwanted homopolymer formation.

[0672] Peptidyl linkers cleavable by lysosomal proteases are also useful, for example, Val-Cit, Val-Ala or other dipeptides. In addition, acid-labile linkers cleavable in the low-pH environment of the lysosome can be used, for example: bis-sialyl ether. Other suitable linkers include cathepsin-labile substrates, particularly those that show optimal function at an acidic pH.

[0673] Exemplary hetero-bifunctional cross-linkers are referenced in Table 6.

TABLE 6
Exemplary Hetero-Bifunctional Cross Linkers
HETERO-BIFUNCTIONAL CROSS-LINKERS

| | | | Spacer Arm |
|---|---|---|---|
| | | | Length after |
| | Reactive | Advantages and | cross-linking |
| Linker | Toward | Applications | (Angstroms) |
| SMPT | Primary amines | Greater stability | 11.2 Å |
| | Sulfhydryls | | |
| SPDP | Primary amines | Thiolation | 6.8 Å |
| | Sulfhydryls | Cleavable cross-linking | |
| LC- | Primary amines | Extended spacer arm | 15.6 Å |
| SPDP | Sulfhydryls | | |
| Sulfo- | Primary amines | Extender spacer arm | 15.6 Å |
| LC- | Sulfhydryls | Water-soluble | |
| SPDP | | | |
| SMCC | Primary amines | Stable maleimide reactive | 11.6 Å |
| | | group | |
| | Sulfhydryls | Enzyme-antibody conjugation | |
| | | Hapten-carrier protein | |
| | | conjugation | |
| Sulfo- | Primary amines | Stable maleimide reactive | 11.6 Å |
| SMCC | | group | |
| | Sulfhydryls | Water-soluble | |
| | | Enzyme-antibody conjugation | |
| MBS | Primary amines | Enzyme-antibody conjugation | 9.9 Å |
| | Sulfhydryls | Hapten-carrier protein | |
| | | conjugation | |
| Sulfo- | Primary amines | Water-soluble | 9.9 Å |
| MBS | Sulfhydryls | | |
| SIAB | Primary amines | Enzyme-antibody conjugation | 10.6 Å |
| | Sulfhydryls | | |
| Sulfo- | Primary amines | Water-soluble | 10.6 Å |
| SIAB | Sulfhydryls | | |
| SMPB | Primary amines | Extended spacer arm | 14.5 Å |
| | Sulfhydryls | Enzyme-antibody conjugation | |
| Sulfo- | Primary amines | Extended spacer arm | 14.5 Å |
| SMPB | Sulfhydryls | Water-soluble | |
| EDE/ | Primary amines | Hapten-Carrier conjugation | 0 |
| Sulfo- | Carboxyl groups | | |
| NHS | | | |
| ABH | Carbohydrates | Reacts with sugar groups | 11.9 Å |
| | Nonselective | | |

[0674] Non-Cleavable Linkers or Direct Attachment:

[0675] In some embodiments of the disclosure, the conjugate can be designed so that the agent is delivered to the target but not released. This can be accomplished by attaching an agent to an AB either directly or via a non-cleavable linker.

[0676] These non-cleavable linkers can include amino acids, peptides, D-amino acids or other organic compounds that can be modified to include functional groups that can subsequently be utilized in attachment to ABs by the methods described herein. A-general formula for such an organic linker could be

W—(CH₂)n-Q

wherein
W is either —NH—CH₂— or —CH₂—;
Q is an amino acid, peptide; and
n is an integer from 0 to 20.

[0677] Non-Cleavable Conjugates:

[0678] In some embodiments, a compound can be attached to ABs that do not activate complement. When using ABs that are incapable of complement activation, this attachment can be accomplished using linkers that are susceptible to cleavage by activated complement or using linkers that are not susceptible to cleavage by activated complement.

[0679] The antibodies disclosed herein can also be formulated as immunoliposomes. Liposomes containing the antibody are prepared by methods known in the art, such as described in Epstein et al., Proc. Natl. Acad. Sci. USA, 82: 3688 (1985); Hwang et al., Proc. Natl Acad. Sci. USA, 77: 4030 (1980); and U.S. Pat. Nos. 4,485,045 and 4,544,545. Liposomes with enhanced circulation time are disclosed in U.S. Pat. No. 5,013,556.

[0680] Particularly useful liposomes can be generated by the reverse-phase evaporation method with a lipid composition comprising phosphatidylcholine, cholesterol, and PEG-derivatized phosphatidylethanolamine (PEG-PE). Liposomes are extruded through filters of defined pore size to yield liposomes with the desired diameter. Fab′ fragments of the antibody of the present disclosure can be conjugated to the liposomes as described in Martin et al., J. Biol. Chem., 257: 286-288 (1982) via a disulfide-interchange reaction.

### DEFINITIONS

[0681] Unless otherwise defined, scientific and technical terms used in connection with the present disclosure shall have the meanings that are commonly understood by those of ordinary skill in the art. The term “a” entity or “an” entity refers to one or more of that entity. For example, a compound refers to one or more compounds. As such, the terms “a”, “an”, “one or more” and “at least one” can be used interchangeably. Further, unless otherwise required by context, singular terms shall include pluralities and plural terms shall include the singular. Generally, nomenclatures utilized in connection with, and techniques of, cell and tissue culture, molecular biology, and protein and oligo- or polynucleotide chemistry and hybridization described herein are those well-known and commonly used in the art. Standard techniques are used for recombinant DNA, oligonucleotide synthesis, and tissue culture and transformation (e.g., electroporation, lipofection). Enzymatic reactions and purification techniques are performed according to manufacturer's specifications or as commonly accomplished in the art or as described herein. The foregoing techniques and procedures are generally performed according to conventional methods well known in the art and as described in various general and more specific references that are cited and discussed throughout the present specification. See e.g., Sambrook et al. Molecular Cloning: A Laboratory Manual (2d ed., Cold Spring Harbor Laboratory Press, Cold Spring Harbor, N.Y. (1989)). The nomenclatures utilized in connection with, and the laboratory procedures and techniques of, analytical chemistry, synthetic organic chemistry, and medicinal and pharmaceutical chemistry described herein are those well-known and commonly used in the art. Standard techniques are used for chemical syntheses, chemical analyses, pharmaceutical preparation, formulation, and delivery, and treatment of patients.

[0682] As utilized in accordance with the present disclosure, the following terms, unless otherwise indicated, shall be understood to have the following meanings:

[0683] As used herein, the term “antibody” refers to immunoglobulin molecules and antigen-binding portions of immunoglobulin (Ig) molecules, i.e., molecules that contain an antigen binding site that specifically binds (immunoreacts with) an antigen. By “specifically bind” or “immunoreacts with” or “immunospecifically bind” is meant that the antibody reacts with one or more antigenic determinants of the desired antigen and does not react with other polypeptides or binds at much lower affinity (K_{d}>10⁻⁶). Antibodies include, but are not limited to, polyclonal, monoclonal, chimeric, domain antibody, single chain, Fab, and F(ab′)₂ fragments, scFvs, and an Fab expression library.

[0684] The basic antibody structural unit is known to comprise a tetramer. Each tetramer is composed of two identical pairs of polypeptide chains, each pair having one “light” (about 25 kDa) and one “heavy” chain (about 50-70 kDa). The amino-terminal portion of each chain includes a variable region of about 100 to 110 or more amino acids primarily responsible for antigen recognition. The carboxy-terminal portion of each chain defines a constant region primarily responsible for effector function. In general, antibody molecules obtained from humans relate to any of the classes IgG, IgM, IgA, IgE and IgD, which differ from one another by the nature of the heavy chain present in the molecule. Certain classes have subclasses as well, such as IgG₁, IgG₂, and others. Furthermore, in humans, the light chain can be a kappa chain or a lambda chain.

[0685] The term “monoclonal antibody” (mAb) or “monoclonal antibody composition”, as used herein, refers to a population of antibody molecules that contain only one molecular species of antibody molecule consisting of a unique light chain gene product and a unique heavy chain gene product. In particular, the complementarity determining regions (CDRs) of the monoclonal antibody are identical in all the molecules of the population. MAbs contain an antigen binding site capable of immunoreacting with a particular epitope of the antigen characterized by a unique binding affinity for it.

[0686] The term “antigen-binding site” or “binding portion” refers to the part of the immunoglobulin molecule that participates in antigen binding. The antigen binding site is formed by amino acid residues of the N-terminal variable (“V”) regions of the heavy (“H”) and light (“L”) chains. Three highly divergent stretches within the V regions of the heavy and light chains, referred to as “hypervariable regions,” are interposed between more conserved flanking stretches known as “framework regions,” or “FRs”. Thus, the term “FR” refers to amino acid sequences that are naturally found between, and adjacent to, hypervariable regions in immunoglobulins. In an antibody molecule, the three hypervariable regions of a light chain and the three hypervariable regions of a heavy chain are disposed relative to each other in three dimensional space to form an antigen-binding surface. The antigen-binding surface is complementary to the three-dimensional surface of a bound antigen, and the three hypervariable regions of each of the heavy and light chains are referred to as “complementarity-determining regions,” or “CDRs.” The assignment of amino acids to each domain is in accordance with the definitions of Kabat Sequences of Proteins of Immunological Interest (National Institutes of Health, Bethesda, Md. (1987 and 1991)), or Chothia & Lesk J. Mol. Biol. 196:901-917 (1987), Chothia et al. Nature 342:878-883 (1989).

[0687] As used herein, the term “epitope” includes any protein determinant capable of specific binding to an immunoglobulin, an scFv, or a T-cell receptor. The term “epitope” includes any protein determinant capable of specific binding to an immunoglobulin or T-cell receptor. Epitopic determinants usually consist of chemically active surface groupings of molecules such as amino acids or sugar side chains and usually have specific three dimensional structural characteristics, as well as specific charge characteristics. For example, antibodies can be raised against N-terminal or C-terminal peptides of a polypeptide. An antibody is said to specifically bind an antigen when the dissociation constant is ≦1 μM; in some embodiments, ≦100 nM and in some embodiments, ≦10 nM.

[0688] As used herein, the terms “specific binding,” “immunological binding,” and “immunological binding properties” refer to the non-covalent interactions of the type which occur between an immunoglobulin molecule and an antigen for which the immunoglobulin is specific. The strength, or affinity of immunological binding interactions can be expressed in terms of the dissociation constant (K_{d}) of the interaction, wherein a smaller K_{d} represents a greater affinity. Immunological binding properties of selected polypeptides can be quantified using methods well known in the art. One such method entails measuring the rates of antigen-binding site/antigen complex formation and dissociation, wherein those rates depend on the concentrations of the complex partners, the affinity of the interaction, and geometric parameters that equally influence the rate in both directions. Thus, both the “on rate constant” (Kₒₙ) and the “off rate constant” (K_{off}) can be determined by calculation of the concentrations and the actual rates of association and dissociation. (See Nature 361:186-87 (1993)). The ratio of K_{off}/Kₘ, is equal to the dissociation constant K_{d}. (See, generally, Davies et al. (1990) Annual Rev Biochem 59:439-473). An antibody of the present disclosure is said to specifically bind to the target, when the binding constant (K_{d}) is ≦1 μM, in some embodiments ≦100 nM, in some embodiments ≦10 nM, and in some embodiments ≦100 pM to about 1 pM, as measured by assays such as radioligand binding assays or similar assays known to those skilled in the art.

[0689] The term “isolated polynucleotide” as used herein shall mean a polynucleotide of genomic, cDNA, or synthetic origin or some combination thereof, which by virtue of its origin the “isolated polynucleotide” (1) is not associated with all or a portion of a polynucleotide in which the “isolated polynucleotide” is found in nature, (2) is operably linked to a polynucleotide which it is not linked to in nature, or (3) does not occur in nature as part of a larger sequence. Polynucleotides in accordance with the disclosure include the nucleic acid molecules encoding the heavy chain immunoglobulin molecules shown herein, and nucleic acid molecules encoding the light chain immunoglobulin molecules shown herein.

[0690] The term “isolated protein” referred to herein means a protein of cDNA, recombinant RNA, or synthetic origin or some combination thereof, which by virtue of its origin, or source of derivation, the “isolated protein” (1) is not associated with proteins found in nature, (2) is free of other proteins from the same source, e.g., free of murine proteins, (3) is expressed by a cell from a different species, or (4) does not occur in nature.

[0691] The term “polypeptide” is used herein as a generic term to refer to native protein, fragments, or analogs of a polypeptide sequence. Hence, native protein fragments, and analogs are species of the polypeptide genus. Polypeptides in accordance with the disclosure comprise the heavy chain immunoglobulin molecules shown herein, and the light chain immunoglobulin molecules shown herein, as well as antibody molecules formed by combinations comprising the heavy chain immunoglobulin molecules with light chain immunoglobulin molecules, such as kappa light chain immunoglobulin molecules, and vice versa, as well as fragments and analogs thereof.

[0692] The term “naturally-occurring” as used herein as applied to an object refers to the fact that an object can be found in nature. For example, a polypeptide or polynucleotide sequence that is present in an organism (including viruses) that can be isolated from a source in nature and that has not been intentionally modified by man in the laboratory or otherwise is naturally-occurring.

[0693] The term “operably linked” as used herein refers to positions of components so described are in a relationship permitting them to function in their intended manner. A control sequence “operably linked” to a coding sequence is ligated in such a way that expression of the coding sequence is achieved under conditions compatible with the control sequences.

[0694] The term “control sequence” as used herein refers to polynucleotide sequences that are necessary to effect the expression and processing of coding sequences to which they are ligated. The nature of such control sequences differs depending upon the host organism in prokaryotes, such control sequences generally include promoter, ribosomal binding site, and transcription termination sequence in eukaryotes, generally, such control sequences include promoters and transcription termination sequence. The term “control sequences” is intended to include, at a minimum, all components whose presence is essential for expression and processing, and can also include additional components whose presence is advantageous, for example, leader sequences and fusion partner sequences. The term “polynucleotide” as referred to herein means nucleotides of at least 10 bases in length, either ribonucleotides or deoxynucleotides or a modified form of either type of nucleotide. The term includes single and double stranded forms of DNA.

[0695] The term oligonucleotide referred to herein includes naturally occurring, and modified nucleotides linked together by naturally occurring, and non-naturally occurring oligonucleotide linkages. Oligonucleotides are a polynucleotide subset generally comprising a length of 200 bases or fewer. In some embodiments, oligonucleotides are 10 to 60 bases in length and in some embodiments, 12, 13, 14, 15, 16, 17, 18, 19, or 20 to 40 bases in length. Oligonucleotides are usually single stranded, e.g., for probes, although oligonucleotides can be double stranded, e.g., for use in the construction of a gene mutant. Oligonucleotides of the disclosure are either sense or antisense oligonucleotides.

[0696] The term “naturally occurring nucleotides” referred to herein includes deoxyribonucleotides and ribonucleotides. The term “modified nucleotides” referred to herein includes nucleotides with modified or substituted sugar groups and the like. The term “oligonucleotide linkages” referred to herein includes oligonucleotide linkages such as phosphorothioate, phosphorodithioate, phosphoroselerloate, phosphorodiselenoate, phosphoroanilothioate, phoshoraniladate, phosphoronmidate, and the like. See e.g., LaPlanche et al. Nucl. Acids Res. 14:9081 (1986); Stec et al. J. Am. Chem. Soc. 106:6077 (1984), Stein et al. Nucl. Acids Res. 16:3209 (1988), Zon et al. Anti Cancer Drug Design 6:539 (1991); Zon et al. Oligonucleotides and Analogues: A Practical Approach, pp. 87-108 (F. Eckstein, Ed., Oxford University Press, Oxford England (1991)); Stec et al. U.S. Pat. No. 5,151,510; Uhlmann and Peyman Chemical Reviews 90:543 (1990). An oligonucleotide can include a label for detection, if desired.

[0697] As used herein, the twenty conventional amino acids and their abbreviations follow conventional usage. See Immunology—A Synthesis (2nd Edition, E. S. Golub and D. R. Green, Eds., Sinauer Associates, Sunderland, Mass. (1991)). Stereoisomers (e.g., D-amino acids) of the twenty conventional amino acids, unnatural amino acids such as α-, α-disubstituted amino acids, N-alkyl amino acids, lactic acid, and other unconventional amino acids can also be suitable components for polypeptides of the present disclosure. Examples of unconventional amino acids include: 4 hydroxyproline, γ-carboxyglutamate, ε-N,N,N-trimethyllysine, ε-N-acetyllysine, σ-phosphoserine, N-acetyl serine, N-formylmethionine, 3-methylhistidine, 5-hydroxylysine, σ-N-methylarginine, and other similar amino acids and imino acids (e.g., 4-hydroxyproline). In the polypeptide notation used herein, the left-hand direction is the amino terminal direction and the right-hand direction is the carboxy-terminal direction, in accordance with standard usage and convention.

[0698] Similarly, unless specified otherwise, the left-hand end of single-stranded polynucleotide sequences is the 5′ end the left-hand direction of double-stranded polynucleotide sequences is referred to as the 5′ direction. The direction of 5′ to 3′ addition of nascent RNA transcripts is referred to as the transcription direction sequence regions on the DNA strand having the same sequence as the RNA and that are 5′ to the 5′ end of the RNA transcript are referred to as “upstream sequences”, sequence regions on the DNA strand having the same sequence as the RNA and that are 3′ to the 3′ end of the RNA transcript are referred to as “downstream sequences”.

[0699] As applied to polypeptides, the term “substantial identity” means that two peptide sequences, when optimally aligned, such as by the programs GAP or BESTFIT using default gap weights, share at least 80 percent sequence identity, in some embodiments, at least 90 percent sequence identity, in some embodiments, at least 95 percent sequence identity, and in some embodiments, at least 99 percent sequence identity.

[0700] In some embodiments, residue positions that are not identical differ by conservative amino acid substitutions.

[0701] As discussed herein, minor variations in the amino acid sequences of antibodies or immunoglobulin molecules are contemplated as being encompassed by the present disclosure, providing that the variations in the amino acid sequence maintain at least 75%, in some embodiments, at least 80%, 90%, 95%, and in some embodiments, 99%. In particular, conservative amino acid replacements are contemplated. Conservative replacements are those that take place within a family of amino acids that are related in their side chains. Genetically encoded amino acids are generally divided into families: (1) acidic amino acids are aspartate, glutamate; (2) basic amino acids are lysine, arginine, histidine; (3) non-polar amino acids are alanine, valine, leucine, isoleucine, proline, phenylalanine, methionine, tryptophan, and (4) uncharged polar amino acids are glycine, asparagine, glutamine, cysteine, serine, threonine, tyrosine. The hydrophilic amino acids include arginine, asparagine, aspartate, glutamine, glutamate, histidine, lysine, serine, and threonine. The hydrophobic amino acids include alanine, cysteine, isoleucine, leucine, methionine, phenylalanine, proline, tryptophan, tyrosine and valine. Other families of amino acids include (i) serine and threonine, which are the aliphatic-hydroxy family; (ii) asparagine and glutamine, which are the amide containing family; (iii) alanine, valine, leucine and isoleucine, which are the aliphatic family; and (iv) phenylalanine, tryptophan, and tyrosine, which are the aromatic family. For example, it is reasonable to expect that an isolated replacement of a leucine with an isoleucine or valine, an aspartate with a glutamate, a threonine with a serine, or a similar replacement of an amino acid with a structurally related amino acid will not have a major effect on the binding or properties of the resulting molecule, especially if the replacement does not involve an amino acid within a framework site. Whether an amino acid change results in a functional peptide can readily be determined by assaying the specific activity of the polypeptide derivative. Assays are described in detail herein. Fragments or analogs of antibodies or immunoglobulin molecules can be readily prepared by those of ordinary skill in the art. Suitable amino- and carboxy-termini of fragments or analogs occur near boundaries of functional domains. Structural and functional domains can be identified by comparison of the nucleotide and/or amino acid sequence data to public or proprietary sequence databases. In some embodiments, computerized comparison methods are used to identify sequence motifs or predicted protein conformation domains that occur in other proteins of known structure and/or function. Methods to identify protein sequences that fold into a known three-dimensional structure are known. Bowie et al. Science 253:164 (1991). Thus, the foregoing examples demonstrate that those of skill in the art can recognize sequence motifs and structural conformations that can be used to define structural and functional domains in accordance with the disclosure.

[0702] Suitable amino acid substitutions are those that: (1) reduce susceptibility to proteolysis, (2) reduce susceptibility to oxidation, (3) alter binding affinity for forming protein complexes, (4) alter binding affinities, and (5) confer or modify other physicochemical or functional properties of such analogs. Analogs can include various muteins of a sequence other than the naturally-occurring peptide sequence. For example, single or multiple amino acid substitutions (for example, conservative amino acid substitutions) can be made in the naturally-occurring sequence (for example, in the portion of the polypeptide outside the domain(s) forming intermolecular contacts. A conservative amino acid substitution should not substantially change the structural characteristics of the parent sequence (e.g., a replacement amino acid should not tend to break a helix that occurs in the parent sequence, or disrupt other types of secondary structure that characterizes the parent sequence). Examples of art-recognized polypeptide secondary and tertiary structures are described in Proteins, Structures and Molecular Principles (Creighton, Ed., W. H. Freeman and Company, New York (1984)); Introduction to Protein Structure (C. Branden and J. Tooze, eds., Garland Publishing, New York, N.Y. (1991)); and Thornton et al. Nature 354:105 (1991).

[0703] The term “polypeptide fragment” as used herein refers to a polypeptide that has an amino terminal and/or carboxy-terminal deletion and/or one or more internal deletion(s), but where the remaining amino acid sequence is identical to the corresponding positions in the naturally-occurring sequence deduced, for example, from a full length cDNA sequence. Fragments typically are at least 5, 6, 8 or 10 amino acids long, in some embodiments, at least 14 amino acids long, in some embodiments, at least 20 amino acids long, usually at least 50 amino acids long, and in some embodiments, at least 70 amino acids long. The term “analog” as used herein refers to polypeptides that are comprised of a segment of at least 25 amino acids that has substantial identity to a portion of a deduced amino acid sequence and that has specific binding to the target, under suitable binding conditions. Typically, polypeptide analogs comprise a conservative amino acid substitution (or addition or deletion) with respect to the naturally-occurring sequence. Analogs typically are at least 20 amino acids long, in some embodiments, at least 50 amino acids long or longer, and can often be as long as a full-length naturally-occurring polypeptide.

[0704] The term “agent” is used herein to denote a chemical compound, a mixture of chemical compounds, a biological macromolecule, or an extract made from biological materials.

[0705] As used herein, the terms “label” or “labeled” refers to incorporation of a detectable marker, e.g., by incorporation of a radiolabeled amino acid or attachment to a polypeptide of biotinyl moieties that can be detected by marked avidin (e.g., streptavidin containing a fluorescent marker or enzymatic activity that can be detected by optical or calorimetric methods). In certain situations, the label or marker can also be therapeutic. Various methods of labeling polypeptides and glycoproteins are known in the art and can be used. Examples of labels for polypeptides include, but are not limited to, the following: radioisotopes or radionuclides (e.g., ³H, ¹⁴C, ¹⁵N, ³⁵S, ⁹⁰Y, ⁹⁹Tc, ¹¹¹In, ¹²⁵I, ¹³¹I), fluorescent labels (e.g., FITC, rhodamine, lanthanide phosphors), enzymatic labels (e.g., horseradish peroxidase, p-galactosidase, luciferase, alkaline phosphatase), chemiluminescent, biotinyl groups, predetermined polypeptide epitopes recognized by a secondary reporter (e.g., leucine zipper pair sequences, binding sites for secondary antibodies, metal binding domains, epitope tags). In some embodiments, labels are attached by spacer arms of various lengths to reduce potential steric hindrance. The term “pharmaceutical agent or drug” as used herein refers to a chemical compound or composition capable of inducing a desired therapeutic effect when properly administered to a patient.

[0706] Other chemistry terms herein are used according to conventional usage in the art, as exemplified by The McGraw-Hill Dictionary of Chemical Terms (Parker, S., Ed., McGraw-Hill, San Francisco (1985)).

[0707] As used herein, “substantially pure” means an object species is the predominant species present (i.e., on a molar basis it is more abundant than any other individual species in the composition), and in some embodiments, a substantially purified fraction is a composition wherein the object species comprises at least about 50 percent (on a molar basis) of all macromolecular species present.

[0708] Generally, a substantially pure composition will comprise more than about 80 percent of all macromolecular species present in the composition, in some embodiments, more than about 85%, 90%, 95%, and 99%. In some embodiments, the object species is purified to essential homogeneity (contaminant species cannot be detected in the composition by conventional detection methods) wherein the composition consists essentially of a single macromolecular species.

[0709] The term patient includes human and veterinary subjects.

[0710] Antibodies and/or activatable antibodies of the disclosure specifically bind a given target, e.g., a human target protein such as human PD-1. Also included in the disclosure are antibodies and/or activatable antibodies that bind to the same epitope as the antibodies and/or activatable antibodies described herein. Also included in the disclosure are antibodies and/or antibodies activatable antibodies that compete with an anti-PD-1 antibody and/or an anti-PD-1 activatable antibody described herein for binding to PD-1, e.g., human PD-1. Also included in the disclosure are antibodies and/or antibodies activatable antibodies that cross-compete with an anti-PD-1 antibody and/or an anti-PD-1 activatable antibody described herein for binding to PD-1, e.g., human PD-1.

[0711] Those skilled in the art will recognize that it is possible to determine, without undue experimentation, if a monoclonal antibody (e.g., a murine monoclonal or humanized antibody) has the same specificity as a monoclonal antibody used in the methods described herein by ascertaining whether the former prevents the latter from binding to the target. If the monoclonal antibody being tested competes with the monoclonal antibody of the disclosure, as shown by a decrease in binding by the monoclonal antibody of the disclosure, then the two monoclonal antibodies bind to the same, or a closely related, epitope. An alternative method for determining whether a monoclonal antibody has the specificity of a monoclonal antibody of the disclosure is to pre-incubate the monoclonal antibody of the disclosure with the target and then add the monoclonal antibody being tested to determine if the monoclonal antibody being tested is inhibited in its ability to bind the target. If the monoclonal antibody being tested is inhibited then, in all likelihood, it has the same, or functionally equivalent, epitopic specificity as the monoclonal antibody of the disclosure.

[0712] Multispecific Activatable Antibodies

[0713] The disclosure also provides multispecific anti-PD-1 activatable antibodies. The multispecific activatable antibodies provided herein are multispecific antibodies that recognize PD-1 and at least one or more different antigens or epitopes and that include at least one masking moiety (MM) linked to at least one antigen- or epitope-binding domain of the multispecific antibody such that coupling of the MM reduces the ability of the antigen- or epitope-binding domain to bind its target. In some embodiments, the MM is coupled to the antigen- or epitope-binding domain of the multispecific antibody via a cleavable moiety (CM) that functions as a substrate for at least one protease. The activatable multispecific antibodies provided herein are stable in circulation, activated at intended sites of therapy and/or diagnosis but not in normal, i.e., healthy tissue, and, when activated, exhibit binding to a target that is at least comparable to the corresponding, unmodified multispecific antibody.

[0714] In some embodiments, the multispecific activatable antibodies are designed to engage immune effector cells, also referred to herein as immune-effector cell engaging multispecific activatable antibodies. In some embodiments, the multispecific activatable antibodies are designed to engage leukocytes, also referred to herein as leukocyte engaging multispecific activatable antibodies. In some embodiments, the multispecific activatable antibodies are designed to engage T cells, also referred to herein as T-cell engaging multispecific activatable antibodies. In some embodiments, the multispecific activatable antibodies engage a surface antigen on a leukocyte, such as on a T cell, on a natural killer (NK) cell, on a myeloid mononuclear cell, on a macrophage, and/or on another immune effector cell. In some embodiments, the immune effector cell is a leukocyte. In some embodiments, the immune effector cell is a T cell. In some embodiments, the immune effector cell is a NK cell. In some embodiments, the immune effector cell is a mononuclear cell, such as a myeloid mononuclear cell. In some embodiments, the multispecific activatable antibodies are designed to bind or otherwise interact with more than one target and/or more than one epitope, also referred to herein as multi-antigen targeting activatable antibodies. As used herein, the terms “target” and “antigen” are used interchangeably.

[0715] In some embodiments, immune effector cell engaging multispecific activatable antibodies of the disclosure include a targeting antibody or antigen-binding fragment thereof that binds PD-1 and an immune effector cell engaging antibody or antigen-binding portion thereof, where at least one of the targeting antibody or antigen-binding fragment thereof and/or the immune effector cell engaging antibody or antigen-binding portion thereof is masked. In some embodiments, the immune effector cell engaging antibody or antigen binding fragment thereof includes a first antibody or antigen-binding fragment thereof (AB1) that binds a first, immune effector cell engaging target, where the AB1 is attached to a masking moiety (MM1) such that coupling of the MM1 reduces the ability of the AB1 to bind the first target. In some embodiments, the targeting antibody or antigen-binding fragment thereof includes a second antibody or fragment thereof that includes a second antibody or antigen-binding fragment thereof (AB2) that binds PD-1, where the AB2 is attached to a masking moiety (MM2) such that coupling of the MM2 reduces the ability of the AB2 to bind PD-1. In some embodiments, the immune effector cell engaging antibody or antigen binding fragment thereof includes a first antibody or antigen-binding fragment thereof (AB1) that binds a first, immune effector cell engaging target, where the AB1 is attached to a masking moiety (MM1) such that coupling of the MM1 reduces the ability of the AB1 to bind the first target, and the targeting antibody or antigen-binding fragment thereof includes a second antibody or fragment thereof that includes a second antibody or antigen-binding fragment thereof (AB2) that binds PD-1, where the AB2 is attached to a masking moiety (MM2) such that coupling of the MM2 reduces the ability of the AB2 to bind PD-1. In some embodiments, the non-immune effector cell engaging antibody is a cancer targeting antibody. In some embodiments the non-immune cell effector antibody is an IgG. In some embodiments the immune effector cell engaging antibody is a scFv. In some embodiments the PD-1-targeting antibody (e.g., non-immune cell effector antibody) is an IgG and the immune effector cell engaging antibody is a scFv. In some embodiments, the immune effector cell is a leukocyte. In some embodiments, the immune effector cell is a T cell. In some embodiments, the immune effector cell is a NK cell. In some embodiments, the immune effector cell is a myeloid mononuclear cell.

[0716] In some embodiments, T-cell engaging multispecific activatable antibodies of the disclosure include a PD-1-targeting antibody or antigen-binding fragment thereof and a T-cell engaging antibody or antigen-binding portion thereof, where at least one of the PD-1-targeting antibody or antigen-binding fragment thereof and/or the T-cell engaging antibody or antigen-binding portion thereof is masked. In some embodiments, the T-cell engaging antibody or antigen binding fragment thereof includes a first antibody or antigen-binding fragment thereof (AB1) that binds a first, T-cell engaging target, where the AB1 is attached to a masking moiety (MM1) such that coupling of the MM1 reduces the ability of the AB1 to bind the first target. In some embodiments, the targeting antibody or antigen-binding fragment thereof includes a second antibody or fragment thereof that includes a second antibody or antigen-binding fragment thereof (AB2) that binds PD-1, where the AB2 is attached to a masking moiety (MM2) such that coupling of the MM2 reduces the ability of the AB2 to bind PD-1. In some embodiments, the T-cell engaging antibody or antigen binding fragment thereof includes a first antibody or antigen-binding fragment thereof (AB1) that binds a first, T-cell engaging target, where the AB1 is attached to a masking moiety (MM1) such that coupling of the MM1 reduces the ability of the AB1 to bind the first target, and the targeting antibody or antigen-binding fragment thereof includes a second antibody or fragment thereof that includes a second antibody or antigen-binding fragment thereof (AB2) that binds PD-1, where the AB2 is attached to a masking moiety (MM2) such that coupling of the MM2 reduces the ability of the AB2 to bind PD-1.

[0717] In some embodiments of an immune effector cell engaging multi specific activatable antibody, one antigen is PD-1, and another antigen is typically a stimulatory or inhibitory receptor present on the surface of a T-cell, natural killer (NK) cell, myeloid mononuclear cell, macrophage, and/or other immune effector cell, such as, but not limited to, B7-H4, BTLA, CD3, CD4, CD8, CD16a, CD25, CD27, CD28, CD32, CD56, CD137, CTLA-4, GITR, HVEM, ICOS, LAG3, NKG2D, OX40, TIGIT, TIM3, or VISTA. In some embodiments, the antigen is a stimulatory receptor present on the surface of a T cell or NK cell; examples of such stimulatory receptors include, but are not limited to, CD3, CD27, CD28, CD137 (also referred to as 4-1BB), GITR, HVEM, ICOS, NKG2D, and OX40. In some embodiments, the antigen is an inhibitory receptor present on the surface of a T-cell; examples of such inhibitory receptors include, but are not limited to, BTLA, CTLA-4, LAG3, TIGIT, TIM3, and NK-expressed KIRs. The antibody domain conferring specificity to the T-cell surface antigen can also be substituted by a ligand or ligand domain that binds to a T-cell receptor, a NK-cell receptor, a macrophage receptor, and/or other immune effector cell receptor, such as, but not limited to, B7-1, B7-2, B7H3, PDL1, PDL2, or TNFSF9.

[0718] In some embodiments, the T-cell engaging multispecific activatable antibody includes an anti-CD3 epsilon (CD3E, also referred to herein as CD3e and CD3) scEv and a targeting antibody or antigen-binding fragment thereof, where at least one of the anti-CD3ε scEv and/or the targeting antibody or antigen-binding portion thereof is masked. In some embodiments, the CD3ε scEv includes a first antibody or antigen-binding fragment thereof (AB1) that binds CD3ε, where the AB1 is attached to a masking moiety (MM1) such that coupling of the MM1 reduces the ability of the AB1 to bind CD3ε. In some embodiments, the targeting antibody or antigen-binding fragment thereof includes a second antibody or fragment thereof that includes a second antibody or antigen-binding fragment thereof (AB2) that binds PD-1, where the AB2 is attached to a masking moiety (MM2) such that coupling of the M11V12 reduces the ability of the AB2 to bind PD-1. In some embodiments, the CD3ε scFv includes a first antibody or antigen-binding fragment thereof (AB1) that binds CD3ε, where the AB1 is attached to a masking moiety (MM1) such that coupling of the MM1 reduces the ability of the AB1 to bind CD3ε, and the targeting antibody or antigen-binding fragment thereof includes a second antibody or fragment thereof that includes a second antibody or antigen-binding fragment thereof (AB2) that binds PD-1, where the AB2 is attached to a masking moiety (MM2) such that coupling of the MM2 reduces the ability of the AB2 to bind PD-1.

[0719] In some embodiments, the multi-antigen targeting antibodies and/or multi-antigen targeting activatable antibodies include at least a first antibody or antigen-binding fragment thereof that binds a first target and/or first epitope and a second antibody or antigen-binding fragment thereof that binds a second target and/or a second epitope. In some embodiments, the multi-antigen targeting antibodies and/or multi-antigen targeting activatable antibodies bind two or more different targets. In some embodiments, the multi-antigen targeting antibodies and/or multi-antigen targeting activatable antibodies bind two or more different epitopes on the same target. In some embodiments, the multi-antigen targeting antibodies and/or multi-antigen targeting activatable antibodies bind a combination of two or more different targets and two or more different epitopes on the same target.

[0720] In some embodiments, a multispecific activatable antibody comprising an IgG has the IgG variable domains masked. In some embodiments, a multispecific activatable antibody comprising a scFv has the scFv domains masked. In some embodiments, a multispecific activatable antibody has both IgG variable domains and scFv domains, where at least one of the IgG variable domains is coupled to a masking moiety. In some embodiments, a multispecific activatable antibody has both IgG variable domains and scFv domains, where at least one of the scFv domains is coupled to a masking moiety. In some embodiments, a multispecific activatable antibody has both IgG variable domains and scFv domains, where at least one of the IgG variable domains is coupled to a masking moiety and at least one of the scFv domains is coupled to a masking moiety. In some embodiments, a multispecific activatable antibody has both IgG variable domains and scFv domains, where each of the IgG variable domains and the scFv domains is coupled to its own masking moiety. In some embodiments, one antibody domain of a multispecific activatable antibody has specificity for a target antigen and another antibody domain has specificity for a T-cell surface antigen. In some embodiments, one antibody domain of a multispecific activatable antibody has specificity for a target antigen and another antibody domain has specificity for another target antigen. In some embodiments, one antibody domain of a multispecific activatable antibody has specificity for an epitope of a target antigen and another antibody domain has specificity for another epitope of the target antigen.

[0721] In a multispecific activatable antibody, a scFv can be fused to the carboxyl terminus of the heavy chain of an IgG activatable antibody, to the carboxyl terminus of the light chain of an IgG activatable antibody, or to the carboxyl termini of both the heavy and light chains of an IgG activatable antibody. In a multispecific activatable antibody, a scFv can be fused to the amino terminus of the heavy chain of an IgG activatable antibody, to the amino terminus of the light chain of an IgG activatable antibody, or to the amino termini of both the heavy and light chains of an IgG activatable antibody. In a multispecific activatable antibody, a scFv can be fused to any combination of one or more carboxyl termini and one or more amino termini of an IgG activatable antibody. In some embodiments, a masking moiety (MM) linked to a cleavable moiety (CM) is attached to and masks an antigen binding domain of the IgG. In some embodiments, a masking moiety (MM) linked to a cleavable moiety (CM) is attached to and masks an antigen binding domain of at least one scFv. In some embodiments, a masking moiety (MM) linked to a cleavable moiety (CM) is attached to and masks an antigen binding domain of an IgG and a masking moiety (MM) linked to a cleavable moiety (CM) is attached to and masks an antigen binding domain of at least one scFv.

[0722] The disclosure provides examples of multispecific activatable antibody structures which include, but are not limited to, the following: (VL-CL)₂:(VH-CH1-CH2-CH3-L4-VH*-L3-VL*-L2-CM-L1-M M)₂; (VL-CL)₂:(VH-CH1-CH2-CH3-L4-VL*-L3-VH*-L2-CM-L1-MM)₂; (MM-L1-CM-L2-VL-CL)₂:(VH-CH1-CH2-CH3-L4-VH*-L3-VL*)₂; (MM-L1-CM-L2-VL-CL)₂:(VH-CH1-CH2-CH3-L4-VL*-L3-VH*)₂; (VL-CL)₂:(MM-L1-CM-L2-VL*-L3-VH*-L4-VH-CH1-CH2-CH3)₂; (VL-CL)₂:(MM-L1-CM-L2-VH*-L3-VL*-L4-VH-CH1-CH2-CH3)₂; (MM-L1-CM-L2-VL-CL)₂:(VL*-L3-VH*-L4-VH-CH1-CH2-CH3)₂; (MM-L1-CM-L2-VL-CL)₂:(VH*-L3-VL*-L4-VH-CH1-CH2-CH3)₂; (VL-CL-L4-VH*-L3-VL*-L2-CM-L1-MM)₂:(VH-CH1-CH2-CH3)₂; (VL-CL-L4-VL*-L3-VH*-L2-CM-L1-MM)₂: (VH-CH1-CH2-CH3)₂; (MM-L1-CM-L2-VL*-L3-VH*-L4-VL-CL)₂:(VH-CH1-CH2-CH3)₂; (MM-L1-CM-L2-VH*-L3-VL*-L4-VL-CL)₂:(VH-CH1-CH2-CH3)₂; (VL-CL-L4-VH*-L3-VL*-L2-CM-L1-MM)₂: (MM-L1-CM-L2-VL*-L3-VH*-L4-VH-CH1-CH2-CH3)₂; (VL-CL-L4-VH*-L3-VL*-L2-CM-L1-MM)₂: (MM-L1-CM-L2-VH*-L3-VL*-L4-VH-CH1-CH2-CH3)₂; (VL-CL-L4-VL*-L3-VH*-L2-CM-L1-M M)₂: (MM-L1-CM-L2-VL*-L3-VH*-L4-VH-CH1-CH2-CH3)₂; (VL-CL-L4-VL*-L3-VH*-L2-CM-L1-MM)₂: (MM-L1-CM-L2-VH*-L3-VL*-L4-VH-CH1-CH2-CH3)₂; (VL-CL-L4-VH*-L3-VL*)₂: (MM-L1-CM-L2-VL*-L3-VH*-L4-VH-CH1-CH2-CH3)₂; (VL-CL-L4-VH*-L3-VL*)₂: (MM-L1-CM-L2-VH*-L3-VL*-L4-VH-CH1-CH2-CH3)₂; (VL-CL-L4-VL*-L3-VH*)₂: (MM-L1-CM-L2-VL*-L3-VH*-L4-VH-CH1-CH2-CH3)₂; (VL-CL-L4-VL*-L3-VH*)₂: (MM-L1-CM-L2-VH*-L3-VL*-L4-VH-CH1-CH2-CH3)2; (VL-CL-L4-VH*-L3-VL*-L2-CM-L1-MM)₂: (VL*-L3-VH*-L4-VH-CH1-CH2-CH3)₂; (VL-CL-L4-VH*-L3-VL*-L2-CM-L1-MM)₂: (VH*-L3-VL*-L4-VH-CH1-CH2-CH3)₂; (VL-CL-L4-VL*-L3-VH*-L2-CM-L1-MM)₂: (VL*-L3-VH*-L4-VH-CH1-CH2-CH3)₂; or (VL-CL-L4-VL*-L3-VH*-L2-CM-L1-MM)₂: (VH*-L3-VL*-L4-VH-CH1-CH2-CH3)₂, wherein: VL and VH represent the light and heavy variable domains of the first specificity, contained in the IgG; VL* and VH* represent the variable domains of the second specificity, contained in the scFv; L1 is a linker peptide connecting the masking moiety (MM) and the cleavable moiety (CM); L2 is a linker peptide connecting the cleavable moiety (CM), and the antibody; L3 is a linker peptide connecting the variable domains of the scFv; L4 is a linker peptide connecting the antibody of the first specificity to the antibody of the second specificity; CL is the light-chain constant domain; and CH1, CH2, CH3 are the heavy chain constant domains. The first and second specificities can be toward any antigen or epitope.

[0723] In some embodiments of a T-cell engaging multispecific activatable antibody, one antigen is PD-1, and another antigen is typically a stimulatory (also referred to herein as activating) or inhibitory receptor present on the surface of a T-cell, natural killer (NK) cell, myeloid mononuclear cell, macrophage, and/or other immune effector cell, such as, but not limited to, B7-H4, BTLA, CD3, CD4, CD8, CD16a, CD25, CD27, CD28, CD32, CD56, CD137 (also referred to as TNFRSF9), CTLA-4, GITR, HVEM, ICOS, LAG3, NKG2D, OX40, PD-1, TIGIT, TIM3, or VISTA. The antibody domain conferring specificity to the T-cell surface antigen can also be substituted by a ligand or ligand domain that binds to a T-cell receptor, a NK-cell receptor, a macrophage receptor, and/or other immune effector cell receptor.

[0724] In some embodiments, the targeting antibody is an anti-PD-1 antibody disclosed herein. In some embodiments, the targeting antibody can be in the form an activatable antibody. In some embodiments, the scFv(s) can be in the form of a Pro-scFv (see, e.g., WO 2009/025846, WO 2010/081173).

[0725] In some embodiments, the scFv is specific for binding CD3ε, and comprises or is derived from an antibody or fragment thereof that binds CD3ε, e.g., CH2527, FN18, H2C, OKT3, 2C11, UCHT1, or V9. In some embodiments, the scFv is specific for binding CTLA-4 (also referred to herein as CTLA and CTLA4).

[0726] In some embodiments, the anti-CTLA-4 scFv includes the amino acid sequence:

(SEQ ID NO: 585)

GGGSGGGGSGSGGGSGGGGSGGGEIVLTQSPGTLSLSPGERATLSCRASQ
SVSSSYLAWYQQKPGQAPRLLIYGASSRATGIPDRFSGSGSGTDFTLTIS
RLEPEDFAVYYCQQYGSSPLTFGGGTKVEIKRSGGSTITSYNVYYTKLSS
SGTQVQLVQTGGGVVQPGRSLRLSCAASGSTFSSYAMSWVRQAPGKGLEW
VSAISGSGGSTYYADSVKGRFTISRDNSKNTLYLQMNSLRAEDTAVYYCA
TNSLYWYFDLWGRGTLVTVSSAS

[0727] In some embodiments, the anti-CTLA-4 scFv includes the amino acid sequence that is at least 90%, 91%, 92%, 93%, 94%, 95%, 96%, 97%, 98%, 99% or more identical to the amino acid sequence of SEQ ID NO: 585.

[0728] In some embodiments, the anti-CD3ε scFv includes the amino acid sequence:

(SEQ ID NO: 586)

GGGSGGGGSGSGGGSGGGGSGGGQVQLQQSGAELARPGASVKMSCKASGY
TFTRYTMHWVKQRPGQGLEWIGYINPSRGYTNYNQKFKDKATLTTDKSSS
TAYMQLSSLTSEDSAVYYCARYYDDHYCLDYWGQGTTLTVSSGGGGSG
GGGSGGGGSQIVLTQSPAIMSASPGEKVTMTCSASSSVSYMNWYQQKS
GTSPKRWIYDTSKLASGVPAHFRGSGSGTSYSLTISGMEAEDAATYYCQ
QWSSNPFTFGSGTKLEINR

[0729] In some embodiments, the anti-CD3ε scFv includes the amino acid sequence that is at least 90%, 91%, 92%, 93%, 94%, 95%, 96%, 97%, 98%, 99% or more identical to the amino acid sequence of SEQ ID NO: 586.

[0730] In some embodiments, the scFv is specific for binding one or more T-cells, one or more NK-cells and/or one or more macrophages. In some embodiments, the scFv is specific for binding a target selected from the group consisting of B7-H4, BTLA, CD3, CD4, CD8, CD16a, CD25, CD27, CD28, CD32, CD56, CD137, CTLA-4, GITR, HVEM, ICOS, LAG3, NKG2D, OX40, TIGIT, TIM3, or VISTA.

[0731] In some embodiments, the multispecific activatable antibody also includes an agent conjugated to the AB. In some embodiments, the agent is a therapeutic agent. In some embodiments, the agent is conjugated to the multispecific activatable antibody via a linker. In some embodiments, the agent is conjugated to the AB via a cleavable linker. In some embodiments, the linker is a non-cleavable linker.

[0732] In some embodiments, the multispecific activatable antibody also includes a detectable moiety. In some embodiments, the detectable moiety is a diagnostic agent.

[0733] In some embodiments, the multispecific activatable antibody naturally contains one or more disulfide bonds. In some embodiments, the multispecific activatable antibody can be engineered to include one or more disulfide bonds.

[0734] The disclosure also provides an isolated nucleic acid molecule encoding a multispecific activatable antibody described herein, as well as vectors that include these isolated nucleic acid sequences. The disclosure provides methods of producing a multispecific activatable antibody by culturing a cell under conditions that lead to expression of the activatable antibody, wherein the cell comprises such a nucleic acid molecule. In some embodiments, the cell comprises such a vector.

[0735] The disclosure also provides a method of manufacturing multispecific activatable antibodies of the disclosure by (a) culturing a cell comprising a nucleic acid construct that encodes the multispecific activatable antibody under conditions that lead to expression of the multispecific activatable, and (b) recovering the multispecific activatable antibody. Suitable AB, MM, and/or CM include any of the AB, MM, and/or CM disclosed herein.

[0736] The disclosure also provides multispecific activatable antibodies and/or multispecific activatable antibody compositions that include at least a first antibody or antigen-binding fragment thereof (AB1) that specifically binds a first target or first epitope and a second antibody or antigen-biding fragment thereof (AB2) that binds a second target or a second epitope, where at least AB1 is coupled or otherwise attached to a masking moiety (MM1), such that coupling of the MM1 reduces the ability of AB1 to bind its target. In some embodiments, the MM1 is coupled to AB1 via a first cleavable moiety (CM1) sequence that includes a substrate for a protease, for example, a protease that is co-localized with the target of AB1 at a treatment site or a diagnostic site in a subject. The multispecific activatable antibodies provided herein are stable in circulation, activated at intended sites of therapy and/or diagnosis but not in normal, i.e., healthy tissue, and, when activated, exhibit binding to the target of AB1 that is at least comparable to the corresponding, unmodified multispecific antibody. Suitable AB, MM, and/or CM include any of the AB, MM, and/or CM disclosed herein.

[0737] The disclosure also provides compositions and methods that include a multispecific activatable antibody that includes at least a first antibody or antibody fragment (AB1) that specifically binds a target and a second antibody or antibody fragment (AB2), where at least the first AB in the multispecific activatable antibody is coupled to a masking moiety (MM1) that decreases the ability of AB1 to bind its target. In some embodiments, each AB is coupled to a MM that decreases the ability of its corresponding AB to each target. For example, in bispecific activatable antibody embodiments, AB1 is coupled to a first masking moiety (MM1) that decreases the ability of AB1 to bind its target, and AB2 is coupled to a second masking moiety (MM2) that decreases the ability of AB2 to bind its target. In some embodiments, the multispecific activatable antibody comprises more than two AB regions; in such embodiments, AB1 is coupled to a first masking moiety (MM1) that decreases the ability of AB1 to bind its target, AB2 is coupled to a second masking moiety (MM2) that decreases the ability of AB2 to bind its target, AB3 is coupled to a third masking moiety (MM3) that decreases the ability of AB3 to bind its target, and so on for each AB in the multispecific activatable antibody. Suitable AB, MM, and/or CM include any of the AB, MM, and/or CM disclosed herein.

[0738] In some embodiments, the multispecific activatable antibody further includes at least one cleavable moiety (CM) that is a substrate for a protease, where the CM links a MM to an AB. For example, in some embodiments, the multispecific activatable antibody includes at least a first antibody or antibody fragment (AB1) that specifically binds a target and a second antibody or antibody fragment (AB2), where at least the first AB in the multispecific activatable antibody is coupled via a first cleavable moiety (CM1) to a masking moiety (MM1) that decreases the ability of AB1 to bind its target. In some bispecific activatable antibody embodiments, AB1 is coupled via CM1 to MM1, and AB2 is coupled via a second cleavable moiety (CM2) to a second masking moiety (MM2) that decreases the ability of AB2 to bind its target. In some embodiments, the multispecific activatable antibody comprises more than two AB regions; in some of these embodiments, AB1 is coupled via CM1 to MM1, AB2 is coupled via CM2 to MM2, and AB3 is coupled via a third cleavable moiety (CM3) to a third masking moiety (MM3) that decreases the ability of AB3 to bind its target, and so on for each AB in the multispecific activatable antibody. Suitable AB, MINI, and/or CM include any of the AB, MM, and/or CM disclosed herein.

[0739] Activatable Antibodies Having Non-Binding Steric Moieties or Binding Partners for Non-Binding Steric Moieties

[0740] The disclosure also provides activatable antibodies that include non-binding steric moieties (NB) or binding partners (BP) for non-binding steric moieties, where the BP recruits or otherwise attracts the NB to the activatable antibody. The activatable antibodies provided herein include, for example, an activatable antibody that includes a non-binding steric moiety (NB), a cleavable linker (CL) and antibody or antibody fragment (AB) that binds a target; an activatable antibody that includes a binding partner for a non-binding steric moiety (BP), a CL and an AB; and an activatable antibody that includes a BP to which an NB has been recruited, a CL and an AB that binds the target. Activatable antibodies in which the NB is covalently linked to the CL and AB of the activatable antibody or is associated by interaction with a BP that is covalently linked to the CL and AB of the activatable antibody are referred to herein as “NB-containing activatable antibodies.” By activatable or switchable is meant that the activatable antibody exhibits a first level of binding to a target when the activatable antibody is in an inhibited, masked or uncleaved state (i.e., a first conformation), and a second level of binding to the target when the activatable antibody is in an uninhibited, unmasked and/or cleaved state (i.e., a second conformation, i.e., activated antibody), where the second level of target binding is greater than the first level of target binding. The activatable antibody compositions can exhibit increased bioavailability and more favorable biodistribution compared to conventional antibody therapeutics.

[0741] In some embodiments, activatable antibodies provide for reduced toxicity and/or adverse side effects that could otherwise result from binding of the at non-treatment sites and/or non-diagnostic sites if the AB were not masked or otherwise inhibited from binding to such a site.

[0742] Anti-PD-1 activatable antibodies that include a non-binding steric moiety (NB) can be made using the methods set forth in PCT Publication No. WO 2013/192546, the contents of which are hereby incorporated by reference in their entirety.

[0743] Use of Antibodies and Activatable Antibodies

[0744] It will be appreciated that administration of therapeutic entities in accordance with the disclosure will be administered with suitable carriers, excipients, and other agents that are incorporated into formulations to provide improved transfer, delivery, tolerance, and the like. A multitude of appropriate formulations can be found in the formulary known to all pharmaceutical chemists: Remington's Pharmaceutical Sciences (15th ed, Mack Publishing Company, Easton, Pa. (1975)), particularly Chapter 87 by Blaug, Seymour, therein. These formulations include, for example, powders, pastes, ointments, jellies, waxes, oils, lipids, lipid (cationic or anionic) containing vesicles (such as Lipofectin™), DNA conjugates, anhydrous absorption pastes, oil-in-water and water-in-oil emulsions, emulsions carbowax (polyethylene glycols of various molecular weights), semi-solid gels, and semi-solid mixtures containing carbowax. Any of the foregoing mixtures can be appropriate in treatments and therapies in accordance with the present disclosure, provided that the active ingredient in the formulation is not inactivated by the formulation and the formulation is physiologically compatible and tolerable with the route of administration. See also Baldrick P. “Pharmaceutical excipient development: the need for preclinical guidance.” Regul. Toxicol Pharmacol. 32(2):210-8 (2000), Wang W. “Lyophilization and development of solid protein pharmaceuticals.” Int. J. Pharm. 203(1-2):1-60 (2000), Charman W N “Lipids, lipophilic drugs, and oral drug delivery-some emerging concepts.” J Pharm Sci. 89(8):967-78 (2000), Powell et al. “Compendium of excipients for parenteral formulations” PDA J Pharm Sci Technol. 52:238-311(1998) and the citations therein for additional information related to formulations, excipients and carriers well known to pharmaceutical chemists.

[0745] Therapeutic formulations of the disclosure, which include an anti-PD-1 antibody and/or activatable anti-PD-1 antibody, such as by way of non-limiting example, an antibody and/or an activatable antibody, are used to prevent, treat or otherwise ameliorate a disease or disorder associated with aberrant target expression and/or activity. For example, therapeutic formulations of the disclosure, which include an antibody and/or an activatable antibody, are used to treat or otherwise ameliorate a cancer or other neoplastic condition, inflammation, an inflammatory disorder, and/or an autoimmune disease. In some embodiments, the cancer is a solid tumor or a hematologic malignancy where the target is expressed. In some embodiments, the cancer is a solid tumor where the target is expressed. In some embodiments, the cancer is a hematologic malignancy where the target is expressed. In some embodiments, the target is expressed on parenchyma (e.g., in cancer, the portion of an organ or tissue that often carries out function(s) of the organ or tissue). In some embodiments, the target is expressed on a cell, tissue, or organ. In some embodiments, the target is expressed on stroma (i.e., the connective supportive framework of a cell, tissue, or organ). In some embodiments, the target is expressed on an osteoblast. In some embodiments, the target is expressed on the endothelium (vasculature). In some embodiments, the target is expressed on a cancer stem cell.

[0746] Efficaciousness of prevention, amelioration or treatment is determined in association with any known method for diagnosing or treating the disease or disorder associated with target expression and/or activity, such as, for example, aberrant target expression and/or activity. Prolonging the survival of a subject or otherwise delaying the progression of the disease or disorder associated with target expression and/or activity, e.g., aberrant target expression and/or activity, in a subject indicates that the antibody and/or activatable antibody confers a clinical benefit.

[0747] An antibody and/or an activatable antibody can be administered in the form of pharmaceutical compositions. Principles and considerations involved in preparing such compositions, as well as guidance in the choice of components are provided, for example, in Remington: The Science And Practice Of Pharmacy 19th ed. (Alfonso R. Gennaro, et al., editors) Mack Pub. Co., Easton, Pa.: 1995; Drug Absorption Enhancement: Concepts, Possibilities, Limitations, And Trends, Harwood Academic Publishers, Langhorne, Pa., 1994; and Peptide And Protein Drug Delivery (Advances In Parenteral Sciences, Vol. 4), 1991, M. Dekker, New York.

[0748] In some embodiments where antibody fragments are used, the smallest fragment that specifically binds to the binding domain of the target protein is selected. For example, based upon the variable-region sequences of an antibody, peptide molecules can be designed that retain the ability to bind the target protein sequence. Such peptides can be synthesized chemically and/or produced by recombinant DNA technology. (See, e.g., Marasco et al., Proc. Natl. Acad. Sci. USA, 90: 7889-7893 (1993)). The formulation can also contain more than one active compounds as necessary for the particular indication being treated, for example, in some embodiments, those with complementary activities that do not adversely affect each other. In some embodiments, or in addition, the composition can comprise an agent that enhances its function, such as, for example, a cytotoxic agent, cytokine, chemotherapeutic agent, or growth-inhibitory agent. Such molecules are suitably present in combination in amounts that are effective for the purpose intended.

[0749] The active ingredients can also be entrapped in microcapsules prepared, for example, by coacervation techniques or by interfacial polymerization, for example, hydroxymethylcellulose or gelatin-microcapsules and poly-(methylmethacrylate) microcapsules, respectively, in colloidal drug delivery systems (for example, liposomes, albumin microspheres, microemulsions, nano-particles, and nanocapsules) or in macroemulsions.

[0750] The formulations to be used for in vivo administration must be sterile. This is readily accomplished by filtration through sterile filtration membranes.

[0751] Sustained-release preparations can be prepared. Suitable examples of sustained-release preparations include semipermeable matrices of solid hydrophobic polymers containing the antibody, which matrices are in the form of shaped articles, e.g., films, or microcapsules. Examples of sustained-release matrices include polyesters, hydrogels (for example, poly(2-hydroxyethyl-methacrylate), or poly(vinylalcohol)), polylactides (U.S. Pat. No. 3,773,919), copolymers of L-glutamic acid and γ ethyl-L-glutamate, non-degradable ethylene-vinyl acetate, degradable lactic acid-glycolic acid copolymers such as the LUPRON DEPOT™ (injectable microspheres composed of lactic acid-glycolic acid copolymer and leuprolide acetate), and poly-D-(−)-3-hydroxybutyric acid. While polymers such as ethylene-vinyl acetate and lactic acid-glycolic acid enable release of molecules for over 100 days, certain hydrogels release proteins for shorter time periods.

[0752] In some embodiments, the antibody and/or activatable antibody contains a detectable label. An intact antibody, or a fragment thereof (e.g., Fab, scFv, or F(ab)₂) is used. The term “labeled”, with regard to the probe or antibody, is intended to encompass direct labeling of the probe or antibody by coupling (i.e., physically linking) a detectable substance to the probe or antibody, as well as indirect labeling of the probe or antibody by reactivity with another reagent that is directly labeled. Examples of indirect labeling include detection of a primary antibody using a fluorescently-labeled secondary antibody and end-labeling of a DNA probe with biotin such that it can be detected with fluorescently-labeled streptavidin. The term “biological sample” is intended to include tissues, cells and biological fluids isolated from a subject, as well as tissues, cells and fluids present within a subject. Included within the usage of the term “biological sample”, therefore, is blood and a fraction or component of blood including blood serum, blood plasma, or lymph. That is, the detection method of the disclosure can be used to detect an analyte mRNA, protein, or genomic DNA in a biological sample in vitro as well as in vivo. For example, in vitro techniques for detection of an analyte mRNA include Northern hybridizations and in situ hybridizations. In vitro techniques for detection of an analyte protein include enzyme linked immunosorbent assays (ELISAs), Western blots, immunoprecipitations, immunochemical staining, and immunofluorescence. In vitro techniques for detection of an analyte genomic DNA include Southern hybridizations. Procedures for conducting immunoassays are described, for example in “ELISA: Theory and Practice: Methods in Molecular Biology”, Vol. 42, J. R. Crowther (Ed.) Human Press, Totowa, N.J., 1995; “Immunoassay”, E. Diamandis and T. Christopoulus, Academic Press, Inc., San Diego, Calif., 1996; and “Practice and Theory of Enzyme Immunoassays”, P. Tijssen, Elsevier Science Publishers, Amsterdam, 1985. Furthermore, in vivo techniques for detection of an analyte protein include introducing into a subject a labeled anti-analyte protein antibody. For example, the antibody can be labeled with a radioactive marker whose presence and location in a subject can be detected by standard imaging techniques.

[0753] The antibodies and/or activatable antibodies of the disclosure are also useful in a variety of diagnostic and prophylactic formulations. In one embodiment, an antibody and/or an activatable antibody is administered to patients that are at risk of developing one or more of the aforementioned disorders. A patient's or organ's predisposition to one or more of the aforementioned disorders can be determined using genotypic, serological or biochemical markers.

[0754] In some embodiments of the disclosure, an antibody and/or an activatable antibody is administered to human individuals diagnosed with a clinical indication associated with one or more of the aforementioned disorders. Upon diagnosis, an antibody and/or an activatable antibody is administered to mitigate or reverse the effects of the clinical indication.

[0755] An antibody and/or an activatable antibody of the disclosure is also useful in the detection of a target in patient samples and accordingly are useful as diagnostics. For example, the antibodies and/or activatable antibodies, and conjugated versions thereof, of the disclosure are used in in vitro assays, e.g., ELISA, to detect target levels in a patient sample.

[0756] In some embodiments, anti-PDL1 antibodies are used as a diagnostic for patients who are more likely to respond favorably to treatment with an anti-PD-1 antibody and/or activatable antibody of the disclosure. In these embodiments, PD-L1 expression in tumor biopsies on both tumor cells and infiltrating immune cells and PD-L1 expression on immune cells in blood are used to indicate the presence of active immunity and, thus, potential for suppression of T cell activity through the engagement of PD-1 by PD-L1.

[0757] In one embodiment, an antibody, a conjugated antibody, an activatable antibody and/or a conjugated activatable antibody of the disclosure is immobilized on a solid support (e.g., the well(s) of a microtiter plate). The immobilized antibody, conjugated antibody, activatable antibody and/or conjugated activatable antibody serves as a capture antibody for any target that can be present in a test sample. Prior to contacting the immobilized antibody and/or activatable antibody, and/or conjugated versions thereof, with a patient sample, the solid support is rinsed and treated with a blocking agent such as milk protein or albumin to prevent nonspecific adsorption of the analyte.

[0758] Subsequently the wells are treated with a test sample suspected of containing the antigen, or with a solution containing a standard amount of the antigen. Such a sample is, e.g., a serum sample from a subject suspected of having levels of circulating antigen considered to be diagnostic of a pathology. After rinsing away the test sample or standard, the solid support is treated with a second antibody that is detectably labeled. The labeled second antibody serves as a detecting antibody. The level of detectable label is measured, and the concentration of target antigen in the test sample is determined by comparison with a standard curve developed from the standard samples.

[0759] It will be appreciated that based on the results obtained using the antibodies and activatable antibodies of the disclosure, and conjugated versions thereof, in an in vitro diagnostic assay, it is possible to stage a disease in a subject based on expression levels of the target antigen. For a given disease, samples of blood are taken from subjects diagnosed as being at various stages in the progression of the disease, and/or at various points in the therapeutic treatment of the disease. Using a population of samples that provides statistically significant results for each stage of progression or therapy, a range of concentrations of the antigen that can be considered characteristic of each stage is designated.

[0760] An antibody, a conjugated antibody, an activatable antibody and/or a conjugated activatable antibody can also be used in diagnostic and/or imaging methods. In some embodiments, such methods are in vitro methods. In some embodiments, such methods are in vivo methods. In some embodiments, such methods are in situ methods. In some embodiments, such methods are ex vivo methods. For example, activatable antibodies having an enzymatically cleavable CM can be used to detect the presence or absence of an enzyme that is capable of cleaving the CM. Such activatable antibodies can be used in diagnostics, which can include in vivo detection (e.g., qualitative or quantitative) of enzyme activity (or, in some embodiments, an environment of increased reduction potential such as that which can provide for reduction of a disulfide bond) through measured accumulation of activated antibodies (i.e., antibodies resulting from cleavage of an activatable antibody) in a given cell or tissue of a given host organism. Such accumulation of activated antibodies indicates not only that the tissue expresses enzymatic activity (or an increased reduction potential depending on the nature of the CM) but also that the tissue expresses target to which the activated antibody binds.

[0761] For example, the CM can be selected to be substrate for at least one protease found at the site of a tumor, at the site of a viral or bacterial infection at a biologically confined site (e.g., such as in an abscess, in an organ, and the like), and the like. The AB can be one that binds a target antigen. Using methods as disclosed herein, or when appropriate, methods familiar to one skilled in the art, a detectable label (e.g., a fluorescent label or radioactive label or radiotracer) can be conjugated to an AB or other region of an antibody and/or activatable antibody. Suitable detectable labels are discussed in the context of the above screening methods and additional specific examples are provided below. Using an AB specific to a protein or peptide of the disease state, along with at least one protease whose activity is elevated in the disease tissue of interest, activatable antibodies will exhibit an increased rate of binding to disease tissue relative to tissues where the CM specific enzyme is not present at a detectable level or is present at a lower level than in disease tissue or is inactive (e.g., in zymogen form or in complex with an inhibitor). Since small proteins and peptides are rapidly cleared from the blood by the renal filtration system, and because the enzyme specific for the CM is not present at a detectable level (or is present at lower levels in non-disease tissues or is present in inactive conformation), accumulation of activated antibodies in the disease tissue is enhanced relative to non-disease tissues.

[0762] In another example, activatable antibodies can be used to detect the presence or absence of a cleaving agent in a sample. For example, where the activatable antibodies contain a CM susceptible to cleavage by an enzyme, the activatable antibodies can be used to detect (either qualitatively or quantitatively) the presence of an enzyme in the sample. In another example, where the activatable antibodies contain a CM susceptible to cleavage by reducing agent, the activatable antibodies can be used to detect (either qualitatively or quantitatively) the presence of reducing conditions in a sample. To facilitate analysis in these methods, the activatable antibodies can be detectably labeled, and can be bound to a support (e.g., a solid support, such as a slide or bead). The detectable label can be positioned on a portion of the activatable antibody that is not released following cleavage, for example, the detectable label can be a quenched fluorescent label or other label that is not detectable until cleavage has occurred. The assay can be conducted by, for example, contacting the immobilized, detectably labeled activatable antibodies with a sample suspected of containing an enzyme and/or reducing agent for a time sufficient for cleavage to occur, then washing to remove excess sample and contaminants. The presence or absence of the cleaving agent (e.g., enzyme or reducing agent) in the sample is then assessed by a change in detectable signal of the activatable antibodies prior to contacting with the sample e.g., the presence of and/or an increase in detectable signal due to cleavage of the activatable antibody by the cleaving agent in the sample.

[0763] Such detection methods can be adapted to also provide for detection of the presence or absence of a target that is capable of binding the AB of the activatable antibodies when cleaved. Thus, the assays can be adapted to assess the presence or absence of a cleaving agent and the presence or absence of a target of interest. The presence or absence of the cleaving agent can be detected by the presence of and/or an increase in detectable label of the activatable antibodies as described above, and the presence or absence of the target can be detected by detection of a target-AB complex e.g., by use of a detectably labeled anti-target antibody.

[0764] Activatable antibodies are also useful in in situ imaging for the validation of activatable antibody activation, e.g., by protease cleavage, and binding to a particular target. In situ imaging is a technique that enables localization of proteolytic activity and target in biological samples such as cell cultures or tissue sections. Using this technique, it is possible to confirm both binding to a given target and proteolytic activity based on the presence of a detectable label (e.g., a fluorescent label).

[0765] These techniques are useful with any frozen cells or tissue derived from a disease site (e.g. tumor tissue) or healthy tissues. These techniques are also useful with fresh cell or tissue samples.

[0766] In these techniques, an activatable antibody is labeled with a detectable label. The detectable label can be a fluorescent dye, (e.g. a fluorophore, Fluorescein Isothiocyanate (FITC), Rhodamine Isothiocyanate (TRITC), an Alexa Fluor® label), a near infrared (NIR) dye (e.g., Qdot® nanocrystals), a colloidal metal, a hapten, a radioactive marker, biotin and an amplification reagent such as streptavidin, or an enzyme (e.g. horseradish peroxidase or alkaline phosphatase).

[0767] Detection of the label in a sample that has been incubated with the labeled, activatable antibody indicates that the sample contains the target and contains a protease that is specific for the CM of the activatable antibody. In some embodiments, the presence of the protease can be confirmed using broad spectrum protease inhibitors such as those described herein, and/or by using an agent that is specific for the protease, for example, an antibody such as A11, which is specific for the protease matriptase and inhibits the proteolytic activity of matriptase; see e.g., International Publication Number WO 2010/129609, published 11 Nov. 2010. The same approach of using broad spectrum protease inhibitors such as those described herein, and/or by using a more selective inhibitory agent can be used to identify a protease that is specific for the CM of the activatable antibody. In some embodiments, the presence of the target can be confirmed using an agent that is specific for the target, e.g., another antibody, or the detectable label can be competed with unlabeled target. In some embodiments, unlabeled activatable antibody could be used, with detection by a labeled secondary antibody or more complex detection system.

[0768] Similar techniques are also useful for in vivo imaging where detection of the fluorescent signal in a subject, e.g., a mammal, including a human, indicates that the disease site contains the target and contains a protease that is specific for the CM of the activatable antibody.

[0769] These techniques are also useful in kits and/or as reagents for the detection, identification or characterization of protease activity in a variety of cells, tissues, and organisms based on the protease-specific CM in the activatable antibody.

[0770] The disclosure provides methods of using the antibodies and/or activatable antibodies in a variety of diagnostic and/or prophylactic indications. For example, the disclosure provides methods of detecting presence or absence of a cleaving agent and a target of interest in a subject or a sample by (i) contacting a subject or sample with an activatable antibody, wherein the activatable antibody comprises a masking moiety (MINI), a cleavable moiety (CM) that is cleaved by the cleaving agent, e.g., a protease, and an antigen binding domain or fragment thereof (AB) that specifically binds the target of interest, wherein the activatable antibody in an uncleaved, non-activated state comprises a structural arrangement from N-terminus to C-terminus as follows: MM-CM-AB or AB-CM-MM; (a) wherein the MM is a peptide that inhibits binding of the AB to the target, and wherein the MM does not have an amino acid sequence of a naturally occurring binding partner of the AB and is not a modified form of a natural binding partner of the AB; and (b) wherein, in an uncleaved, non-activated state, the MM interferes with specific binding of the AB to the target, and in a cleaved, activated state the MM does not interfere or compete with specific binding of the AB to the target; and (ii) measuring a level of activated activatable antibody in the subject or sample, wherein a detectable level of activated activatable antibody in the subject or sample indicates that the cleaving agent and the target are present in the subject or sample and wherein no detectable level of activated activatable antibody in the subject or sample indicates that the cleaving agent, the target or both the cleaving agent and the target are absent and/or not sufficiently present in the subject or sample. In some embodiments, the activatable antibody is an activatable antibody to which a therapeutic agent is conjugated. In some embodiments, the activatable antibody is not conjugated to an agent. In some embodiments, the activatable antibody comprises a detectable label. In some embodiments, the detectable label is positioned on the AB. In some embodiments, measuring the level of activatable antibody in the subject or sample is accomplished using a secondary reagent that specifically binds to the activated antibody, wherein the reagent comprises a detectable label. In some embodiments, the secondary reagent is an antibody comprising a detectable label.

[0771] The disclosure also provides methods of detecting presence or absence of a cleaving agent in a subject or a sample by (i) contacting a subject or sample with an activatable antibody in the presence of a target of interest, e.g., the target, wherein the activatable antibody comprises a masking moiety (MINI), a cleavable moiety (CM) that is cleaved by the cleaving agent, e.g., a protease, and an antigen binding domain or fragment thereof (AB) that specifically binds the target of interest, wherein the activatable antibody in an uncleaved, non-activated state comprises a structural arrangement from N-terminus to C-terminus as follows: MM-CM-AB or AB-CM-MM; (a) wherein the MM is a peptide that inhibits binding of the AB to the target, and wherein the MM does not have an amino acid sequence of a naturally occurring binding partner of the AB and is not a modified form of a natural binding partner of the AB; and (b) wherein, in an uncleaved, non-activated state, the MM interferes with specific binding of the AB to the target, and in a cleaved, activated state the MM does not interfere or compete with specific binding of the AB to the target; and (ii) measuring a level of activated activatable antibody in the subject or sample, wherein a detectable level of activated activatable antibody in the subject or sample indicates that the cleaving agent is present in the subject or sample and wherein no detectable level of activated activatable antibody in the subject or sample indicates that the cleaving agent is absent and/or not sufficiently present in the subject or sample. In some embodiments, the activatable antibody is an activatable antibody to which a therapeutic agent is conjugated. In some embodiments, the activatable antibody is not conjugated to an agent. In some embodiments, the activatable antibody comprises a detectable label. In some embodiments, the detectable label is positioned on the AB. In some embodiments, measuring the level of activatable antibody in the subject or sample is accomplished using a secondary reagent that specifically binds to the activated antibody, wherein the reagent comprises a detectable label. In some embodiments, the secondary reagent is an antibody comprising a detectable label.

[0772] The disclosure also provides kits for use in methods of detecting presence or absence of a cleaving agent and the target in a subject or a sample, where the kits include at least an activatable antibody comprises a masking moiety (MM), a cleavable moiety (CM) that is cleaved by the cleaving agent, e.g., a protease, and an antigen binding domain or fragment thereof (AB) that specifically binds the target of interest, wherein the activatable antibody in an uncleaved, non-activated state comprises a structural arrangement from N-terminus to C-terminus as follows: MM-CM-AB or AB-CM-MM; (a) wherein the MM is a peptide that inhibits binding of the AB to the target, and wherein the MM does not have an amino acid sequence of a naturally occurring binding partner of the AB and is not a modified form of a natural binding partner of the AB; and (b) wherein, in an uncleaved, non-activated state, the MM interferes with specific binding of the AB to the target, and in a cleaved, activated state the MM does not interfere or compete with specific binding of the AB to the target; and (ii) measuring a level of activated activatable antibody in the subject or sample, wherein a detectable level of activated activatable antibody in the subject or sample indicates that the cleaving agent is present in the subject or sample and wherein no detectable level of activated activatable antibody in the subject or sample indicates that the cleaving agent is absent and/or not sufficiently present in the subject or sample. In some embodiments, the activatable antibody is an activatable antibody to which a therapeutic agent is conjugated. In some embodiments, the activatable antibody is not conjugated to an agent. In some embodiments, the activatable antibody comprises a detectable label. In some embodiments, the detectable label is positioned on the AB. In some embodiments, measuring the level of activatable antibody in the subject or sample is accomplished using a secondary reagent that specifically binds to the activated antibody, wherein the reagent comprises a detectable label. In some embodiments, the secondary reagent is an antibody comprising a detectable label.

[0773] The disclosure also provides methods of detecting presence or absence of a cleaving agent in a subject or a sample by (i) contacting a subject or sample with an activatable antibody, wherein the activatable antibody comprises a masking moiety (MM), a cleavable moiety (CM) that is cleaved by the cleaving agent, e.g., a protease, an antigen binding domain (AB) that specifically binds the target, and a detectable label, wherein the activatable antibody in an uncleaved, non-activated state comprises a structural arrangement from N-terminus to C-terminus as follows: MM-CM-AB or AB-CM-MM; wherein the MM is a peptide that inhibits binding of the AB to the target, and wherein the MM does not have an amino acid sequence of a naturally occurring binding partner of the AB and is not a modified form of a natural binding partner of the AB; wherein, in an uncleaved, non-activated state, the MM interferes with specific binding of the AB to the target, and in a cleaved, activated state the MM does not interfere or compete with specific binding of the AB to the target; and wherein the detectable label is positioned on a portion of the activatable antibody that is released following cleavage of the CM; and (ii) measuring a level of detectable label in the subject or sample, wherein a detectable level of the detectable label in the subject or sample indicates that the cleaving agent is absent and/or not sufficiently present in the subject or sample and wherein no detectable level of the detectable label in the subject or sample indicates that the cleaving agent is present in the subject or sample. In some embodiments, the activatable antibody is an activatable antibody to which a therapeutic agent is conjugated. In some embodiments, the activatable antibody is not conjugated to an agent. In some embodiments, the activatable antibody comprises a detectable label. In some embodiments, the detectable label is positioned on the AB. In some embodiments, measuring the level of activatable antibody in the subject or sample is accomplished using a secondary reagent that specifically binds to the activated antibody, wherein the reagent comprises a detectable label. In some embodiments, the secondary reagent is an antibody comprising a detectable label.

[0774] The disclosure also provides kits for use in methods of detecting presence or absence of a cleaving agent and the target in a subject or a sample, where the kits include at least an activatable antibody and/or conjugated activatable antibody (e.g., an activatable antibody to which a therapeutic agent is conjugated) described herein for use in contacting a subject or biological sample and means for detecting the level of activated activatable antibody and/or conjugated activatable antibody in the subject or biological sample, wherein a detectable level of activated activatable antibody in the subject or biological sample indicates that the cleaving agent and the target are present in the subject or biological sample and wherein no detectable level of activated activatable antibody in the subject or biological sample indicates that the cleaving agent, the target or both the cleaving agent and the target are absent and/or not sufficiently present in the subject or biological sample, such that the target binding and/or protease cleavage of the activatable antibody cannot be detected in the subject or biological sample.

[0775] The disclosure also provides methods of detecting presence or absence of a cleaving agent in a subject or a sample by (i) contacting a subject or biological sample with an activatable antibody in the presence of the target, and (ii) measuring a level of activated activatable antibody in the subject or biological sample, wherein a detectable level of activated activatable antibody in the subject or biological sample indicates that the cleaving agent is present in the subject or biological sample and wherein no detectable level of activated activatable antibody in the subject or biological sample indicates that the cleaving agent is absent and/or not sufficiently present in the subject or biological sample at a detectable level, such that protease cleavage of the activatable antibody cannot be detected in the subject or biological sample. Such an activatable antibody includes a masking moiety (MM), a cleavable moiety (CM) that is cleaved by the cleaving agent, e.g., a protease, and an antigen binding domain or fragment thereof (AB) that specifically binds the target, wherein the activatable antibody in an uncleaved (i.e., non-activated) state comprises a structural arrangement from N-terminus to C-terminus as follows: MM-CM-AB or AB-CM-MM; (a) wherein the MM is a peptide that inhibits binding of the AB to the target, and wherein the MM does not have an amino acid sequence of a naturally occurring binding partner of the AB; and (b) wherein the MM of the activatable antibody in an uncleaved state interferes with specific binding of the AB to the target, and wherein the MM of an activatable antibody in a cleaved (i.e., activated) state does not interfere or compete with specific binding of the AB to the target. In some embodiments, the activatable antibody is an activatable antibody to which a therapeutic agent is conjugated. In some embodiments, the activatable antibody is not conjugated to an agent. In some embodiments, the detectable label is attached to the masking moiety. In some embodiments, the detectable label is attached to the cleavable moiety N-terminal to the protease cleavage site. In some embodiments, a single antigen binding site of the AB is masked. In some embodiments wherein an antibody of the disclosure has at least two antigen binding sites, at least one antigen binding site is masked and at least one antigen binding site is not masked. In some embodiments all antigen binding sites are masked. In some embodiments, the measuring step includes use of a secondary reagent comprising a detectable label.

[0776] The disclosure also provides kits for use in methods of detecting presence or absence of a cleaving agent and the target in a subject or a sample, where the kits include at least an activatable antibody and/or conjugated activatable antibody described herein for use in contacting a subject or biological sample with an activatable antibody in the presence of the target, and measuring a level of activated activatable antibody in the subject or biological sample, wherein a detectable level of activated activatable antibody in the subject or biological sample indicates that the cleaving agent is present in the subject or biological sample and wherein no detectable level of activated activatable antibody in the subject or biological sample indicates that the cleaving agent is absent and/or not sufficiently present in the subject or biological sample at a detectable level, such that protease cleavage of the activatable antibody cannot be detected in the subject or biological sample. Such an activatable antibody includes a masking moiety (MM), a cleavable moiety (CM) that is cleaved by the cleaving agent, e.g., a protease, and an antigen binding domain or fragment thereof (AB) that specifically binds the target, wherein the activatable antibody in an uncleaved (i.e., non-activated) state comprises a structural arrangement from N-terminus to C-terminus as follows: MM-CM-AB or AB-CM-MM; (a) wherein the MM is a peptide that inhibits binding of the AB to the target, and wherein the MM does not have an amino acid sequence of a naturally occurring binding partner of the AB; and (b) wherein the MM of the activatable antibody in an uncleaved state interferes with specific binding of the AB to the target, and wherein the MM of an activatable antibody in a cleaved (i.e., activated) state does not interfere or compete with specific binding of the AB to the target. In some embodiments, the activatable antibody is an activatable antibody to which a therapeutic agent is conjugated. In some embodiments, the activatable antibody is not conjugated to an agent. In some embodiments, the detectable label is attached to the masking moiety. In some embodiments, the detectable label is attached to the cleavable moiety N-terminal to the protease cleavage site. In some embodiments, a single antigen binding site of the AB is masked. In some embodiments wherein an antibody of the disclosure has at least two antigen binding sites, at least one antigen binding site is masked and at least one antigen binding site is not masked. In some embodiments all antigen binding sites are masked. In some embodiments, the measuring step includes use of a secondary reagent comprising a detectable label.

[0777] The disclosure also provides kits for use in methods of detecting presence or absence of a cleaving agent in a subject or a sample, where the kits include at least an activatable antibody and/or conjugated activatable antibody described herein for use in contacting a subject or biological sample and means for detecting the level of activated activatable antibody and/or conjugated activatable antibody in the subject or biological sample, wherein the activatable antibody includes a detectable label that is positioned on a portion of the activatable antibody that is released following cleavage of the CM, wherein a detectable level of activated activatable antibody in the subject or biological sample indicates that the cleaving agent is absent and/or not sufficiently present in the subject or biological sample such that the target binding and/or protease cleavage of the activatable antibody cannot be detected in the subject or biological sample, and wherein no detectable level of activated activatable antibody in the subject or biological sample indicates that the cleaving agent is present in the subject or biological sample at a detectable level.

[0778] The disclosure provides methods of detecting presence or absence of a cleaving agent and the target in a subject or a sample by (i) contacting a subject or biological sample with an activatable antibody, wherein the activatable antibody includes a detectable label that is positioned on a portion of the activatable antibody that is released following cleavage of the CM and (ii) measuring a level of activated activatable antibody in the subject or biological sample, wherein a detectable level of activated activatable antibody in the subject or biological sample indicates that the cleaving agent, the target or both the cleaving agent and the target are absent and/or not sufficiently present in the subject or biological sample, such that the target binding and/or protease cleavage of the activatable antibody cannot be detected in the subject or biological sample, and wherein a reduced detectable level of activated activatable antibody in the subject or biological sample indicates that the cleaving agent and the target are present in the subject or biological sample. A reduced level of detectable label is, for example, a reduction of about 5%, about 10%, about 15%, about 20%, about 25%, about 30%, about 35%, about 40%, about 45%, about 50%, about 55%, about 60%, about 65%, about 70%, about 75%, about 80%, about 85%, about 90%, about 95% and/or about 100%. Such an activatable antibody includes a masking moiety (MM), a cleavable moiety (CM) that is cleaved by the cleaving agent, and an antigen binding domain or fragment thereof (AB) that specifically binds the target, wherein the activatable antibody in an uncleaved (i.e., non-activated) state comprises a structural arrangement from N-terminus to C-terminus as follows: MM-CM-AB or AB-CM-MM; (a) wherein the MM is a peptide that inhibits binding of the AB to the target, and wherein the MM does not have an amino acid sequence of a naturally occurring binding partner of the AB; and (b) wherein the MM of the activatable antibody in an uncleaved state interferes with specific binding of the AB to the target, and wherein the MM of an activatable antibody in a cleaved (i.e., activated) state does not interfere or compete with specific binding of the AB to the target. In some embodiments, the activatable antibody is an activatable antibody to which a therapeutic agent is conjugated. In some embodiments, the activatable antibody is not conjugated to an agent. In some embodiments, the activatable antibody comprises a detectable label. In some embodiments, the detectable label is positioned on the AB. In some embodiments, measuring the level of activatable antibody in the subject or sample is accomplished using a secondary reagent that specifically binds to the activated antibody, wherein the reagent comprises a detectable label. In some embodiments, the secondary reagent is an antibody comprising a detectable label.

[0779] The disclosure also provides kits for use in methods of detecting presence or absence of a cleaving agent and the target in a subject or a sample, where the kits include at least an activatable antibody and/or conjugated activatable antibody described herein for use in contacting a subject or biological sample and means for detecting the level of activated activatable antibody and/or conjugated activatable antibody in the subject or biological sample, wherein a detectable level of activated activatable antibody in the subject or biological sample indicates that the cleaving agent, the target or both the cleaving agent and the target are absent and/or not sufficiently present in the subject or biological sample, such that the target binding and/or protease cleavage of the activatable antibody cannot be detected in the subject or biological sample, and wherein a reduced detectable level of activated activatable antibody in the subject or biological sample indicates that the cleaving agent and the target are present in the subject or biological sample. A reduced level of detectable label is, for example, a reduction of about 5%, about 10%, about 15%, about 20%, about 25%, about 30%, about 35%, about 40%, about 45%, about 50%, about 55%, about 60%, about 65%, about 70%, about 75%, about 80%, about 85%, about 90%, about 95% and/or about 100%.

[0780] The disclosure also provides methods of detecting presence or absence of a cleaving agent in a subject or a sample by (i) contacting a subject or biological sample with an activatable antibody, wherein the activatable antibody includes a detectable label that is positioned on a portion of the activatable antibody that is released following cleavage of the CM; and (ii) measuring a level of detectable label in the subject or biological sample, wherein a detectable level of the detectable label in the subject or biological sample indicates that the cleaving agent is absent and/or not sufficiently present in the subject or biological sample at a detectable level, such that protease cleavage of the activatable antibody cannot be detected in the subject or biological sample, and wherein a reduced detectable level of the detectable label in the subject or biological sample indicates that the cleaving agent is present in the subject or biological sample. A reduced level of detectable label is, for example, a reduction of about 5%, about 10%, about 15%, about 20%, about 25%, about 30%, about 35%, about 40%, about 45%, about 50%, about 55%, about 60%, about 65%, about 70%, about 75%, about 80%, about 85%, about 90%, about 95% and/or about 100%. Such an activatable antibody includes a masking moiety (MM), a cleavable moiety (CM) that is cleaved by the cleaving agent, and an antigen binding domain or fragment thereof (AB) that specifically binds the target, wherein the activatable antibody in an uncleaved (i.e., non-activated) state comprises a structural arrangement from N-terminus to C-terminus as follows: MM-CM-AB or AB-CM-MM; (a) wherein the MM is a peptide that inhibits binding of the AB to the target, and wherein the MM does not have an amino acid sequence of a naturally occurring binding partner of the AB; and (b) wherein the MM of the activatable antibody in an uncleaved state interferes with specific binding of the AB to the target, and wherein the MM of an activatable antibody in a cleaved (i.e., activated) state does not interfere or compete with specific binding of the AB to the target. In some embodiments, the activatable antibody is an activatable antibody to which a therapeutic agent is conjugated. In some embodiments, the activatable antibody is not conjugated to an agent. In some embodiments, the activatable antibody comprises a detectable label. In some embodiments, the detectable label is positioned on the AB. In some embodiments, measuring the level of activatable antibody in the subject or sample is accomplished using a secondary reagent that specifically binds to the activated antibody, wherein the reagent comprises a detectable label. In some embodiments, the secondary reagent is an antibody comprising a detectable label.

[0781] The disclosure also provides kits for use in methods of detecting presence or absence of a cleaving agent of interest in a subject or a sample, where the kits include at least an activatable antibody and/or conjugated activatable antibody described herein for use in contacting a subject or biological sample and means for detecting the level of activated activatable antibody and/or conjugated activatable antibody in the subject or biological sample, wherein the activatable antibody includes a detectable label that is positioned on a portion of the activatable antibody that is released following cleavage of the CM, wherein a detectable level of the detectable label in the subject or biological sample indicates that the cleaving agent, the target, or both the cleaving agent and the target are absent and/or not sufficiently present in the subject or biological sample, such that the target binding and/or protease cleavage of the activatable antibody cannot be detected in the subject or biological sample, and wherein a reduced detectable level of the detectable label in the subject or biological sample indicates that the cleaving agent and the target are present in the subject or biological sample. A reduced level of detectable label is, for example, a reduction of about 5%, about 10%, about 15%, about 20%, about 25%, about 30%, about 35%, about 40%, about 45%, about 50%, about 55%, about 60%, about 65%, about 70%, about 75%, about 80%, about 85%, about 90%, about 95% and/or about 100%.

[0782] In some embodiments of these methods and kits, the activatable antibody includes a detectable label. In some embodiments of these methods and kits, the detectable label includes an imaging agent, a contrasting agent, an enzyme, a fluorescent label, a chromophore, a dye, one or more metal ions, or a ligand-based label. In some embodiments of these methods and kits, the imaging agent comprises a radioisotope. In some embodiments of these methods and kits, the radioisotope is indium or technetium. In some embodiments of these methods and kits, the contrasting agent comprises iodine, gadolinium or iron oxide. In some embodiments of these methods and kits, the enzyme comprises horseradish peroxidase, alkaline phosphatase, or β-galactosidase. In some embodiments of these methods and kits, the fluorescent label comprises yellow fluorescent protein (YFP), cyan fluorescent protein (CFP), green fluorescent protein (GFP), modified red fluorescent protein (mRFP), red fluorescent protein tdimer2 (RFP tdimer2), HCRED, or a europium derivative. In some embodiments of these methods and kits, the luminescent label comprises an N-methylacrydium derivative. In some embodiments of these methods, the label comprises an Alexa Fluor® label, such as Alex Fluor® 680 or Alexa Fluor® 750. In some embodiments of these methods and kits, the ligand-based label comprises biotin, avidin, streptavidin or one or more haptens.

[0783] In some embodiments of these methods and kits, the subject is a mammal. In some embodiments of these methods and kits, the subject is a human. In some embodiments, the subject is a non-human mammal, such as a non-human primate, companion animal (e.g., cat, dog, horse), farm animal, work animal, or zoo animal. In some embodiments, the subject is a rodent.

[0784] In some embodiments of these methods, the method is an in vivo method. In some embodiments of these methods, the method is an in situ method. In some embodiments of these methods, the method is an ex vivo method. In some embodiments of these methods, the method is an in vitro method.

[0785] In some embodiments, in situ imaging and/or in vivo imaging are useful in methods to identify which patients to treat. For example, in in situ imaging, the activatable antibodies are used to screen patient samples to identify those patients having the appropriate protease(s) and target(s) at the appropriate location, e.g., at a tumor site.

[0786] In some embodiments in situ imaging is used to identify or otherwise refine a patient population suitable for treatment with an activatable antibody of the disclosure. For example, patients that test positive for both the target (e.g., the target) and a protease that cleaves the substrate in the cleavable moiety (CM) of the activatable antibody being tested (e.g., accumulate activated antibodies at the disease site) are identified as suitable candidates for treatment with such an activatable antibody comprising such a CM. Likewise, patients that test negative for either or both of the target (e.g., the target) and the protease that cleaves the substrate in the CM in the activatable antibody being tested using these methods might be identified as suitable candidates for another form of therapy. In some embodiments, such patients that test negative with respect to a first activatable antibody can be tested with other activatable antibodies comprising different CMs until a suitable activatable antibody for treatment is identified (e.g., an activatable antibody comprising a CM that is cleaved by the patient at the site of disease). In some embodiments, the patient is then administered a therapeutically effective amount of the activatable antibody for which the patient tested positive.

[0787] In some embodiments in vivo imaging is used to identify or otherwise refine a patient population suitable for treatment with an activatable antibody of the disclosure. For example, patients that test positive for both the target (e.g., the target) and a protease that cleaves the substrate in the cleavable moiety (CM) of the activatable antibody being tested (e.g., accumulate activated antibodies at the disease site) are identified as suitable candidates for treatment with such an activatable antibody comprising such a CM. Likewise, patients that test negative might be identified as suitable candidates for another form of therapy. In some embodiments, such patients that test negative with respect to a first activatable antibody can be tested with other activatable antibodies comprising different CMs until a suitable activatable antibody for treatment is identified (e.g., an activatable antibody comprising a CM that is cleaved by the patient at the site of disease). In some embodiments, the patient is then administered a therapeutically effective amount of the activatable antibody for which the patient tested positive.

[0788] In some embodiments of the methods and kits, the method or kit is used to identify or otherwise refine a patient population suitable for treatment with an activatable antibody of the disclosure. For example, patients that test positive for both the target (e.g., the target) and a protease that cleaves the substrate in the cleavable moiety (CM) of the activatable antibody being tested in these methods are identified as suitable candidates for treatment with such an activatable antibody comprising such a CM. Likewise, patients that test negative for both of the targets (e.g., the target) and the protease that cleaves the substrate in the CM in the activatable antibody being tested using these methods might be identified as suitable candidates for another form of therapy. In some embodiments, such patients can be tested with other activatable antibodies until a suitable activatable antibody for treatment is identified (e.g., an activatable antibody comprising a CM that is cleaved by the patient at the site of disease). In some embodiments, patients that test negative for either of the target (e.g., the target) are identified as suitable candidates for treatment with such an activatable antibody comprising such a CM. In some embodiments, patients that test negative for either of the target (e.g., the target) are identified as not being suitable candidates for treatment with such an activatable antibody comprising such a CM. In some embodiments, such patients can be tested with other activatable antibodies until a suitable activatable antibody for treatment is identified (e.g., an activatable antibody comprising a CM that is cleaved by the patient at the site of disease). In some embodiments, the activatable antibody is an activatable antibody to which a therapeutic agent is conjugated. In some embodiments, the activatable antibody is not conjugated to an agent. In some embodiments, the activatable antibody comprises a detectable label. In some embodiments, the detectable label is positioned on the AB. In some embodiments, measuring the level of activatable antibody in the subject or sample is accomplished using a secondary reagent that specifically binds to the activated antibody, wherein the reagent comprises a detectable label. In some embodiments, the secondary reagent is an antibody comprising a detectable label.

[0789] In some embodiments, a method or kit is used to identify or otherwise refine a patient population suitable for treatment with an anti-the target activatable antibody and/or conjugated activatable antibody (e.g., activatable antibody to which a therapeutic agent is conjugated) of the disclosure, followed by treatment by administering that activatable antibody and/or conjugated activatable antibody to a subject in need thereof. For example, patients that test positive for both the targets (e.g., the target) and a protease that cleaves the substrate in the cleavable moiety (CM) of the activatable antibody and/or conjugated activatable antibody being tested in these methods are identified as suitable candidates for treatment with such antibody and/or such a conjugated activatable antibody comprising such a CM, and the patient is then administered a therapeutically effective amount of the activatable antibody and/or conjugated activatable antibody that was tested. Likewise, patients that test negative for either or both of the target (e.g., the target) and the protease that cleaves the substrate in the CM in the activatable antibody being tested using these methods might be identified as suitable candidates for another form of therapy. In some embodiments, such patients can be tested with other antibody and/or conjugated activatable antibody until a suitable antibody and/or conjugated activatable antibody for treatment is identified (e.g., an activatable antibody and/or conjugated activatable antibody comprising a CM that is cleaved by the patient at the site of disease). In some embodiments, the patient is then administered a therapeutically effective amount of the activatable antibody and/or conjugated activatable antibody for which the patient tested positive.

[0790] In some embodiments of these methods and kits, the MM is a peptide having a length from about 4 to 40 amino acids. In some embodiments of these methods and kits, the activatable antibody comprises a linker peptide, wherein the linker peptide is positioned between the MM and the CM. In some embodiments of these methods and kits, the activatable antibody comprises a linker peptide, where the linker peptide is positioned between the AB and the CM. In some embodiments of these methods and kits, the activatable antibody comprises a first linker peptide (L1) and a second linker peptide (L2), wherein the first linker peptide is positioned between the MM and the CM and the second linker peptide is positioned between the AB and the CM. In some embodiments of these methods and kits, each of L1 and L2 is a peptide of about 1 to 20 amino acids in length, and wherein each of L1 and L2 need not be the same linker. In some embodiments of these methods and kits, one or both of L1 and L2 comprises a glycine-serine polymer. In some embodiments of these methods and kits, at least one of L1 and L2 comprises an amino acid sequence selected from the group consisting of (GS)n, (GSGGS)n (SEQ ID NO: 363) and (GGGS)n (SEQ ID NO: 364), where n is an integer of at least one. In some embodiments of these methods and kits, at least one of L1 and L2 comprises an amino acid sequence having the formula (GGS)n, where n is an integer of at least one. In some embodiments of these methods and kits, at least one of L1 and L2 comprises an amino acid sequence selected from the group consisting of GGSG (SEQ ID NO: 365), GGSGG (SEQ ID NO: 366), GSGSG (SEQ ID NO: 367), GSGGG (SEQ ID NO: 368), GGGSG (SEQ ID NO: 369), and GSSSG (SEQ ID NO: 370).

[0791] In some embodiments of these methods and kits, the AB comprises an antibody or antibody fragment sequence selected from the cross-reactive antibody sequences presented herein. In some embodiments of these methods and kits, the AB comprises a Fab fragment, a scFv or a single chain antibody (scAb).

[0792] In some embodiments of these methods and kits, the cleaving agent is a protease that is co-localized in the subject or sample with the target and the CM is a polypeptide that functions as a substrate for the protease, wherein the protease cleaves the CM in the activatable antibody when the activatable antibody is exposed to the protease. In some embodiments of these methods and kits, the CM is a polypeptide of up to 15 amino acids in length. In some embodiments of these methods and kits, the CM is coupled to the N-terminus of the AB. In some embodiments of these methods and kits, the CM is coupled to the C-terminus of the AB. In some embodiments of these methods and kits, the CM is coupled to the N-terminus of a VL chain of the AB.

[0793] The antibodies and/or activatable antibodies of the disclosure are used in diagnostic and prophylactic formulations. In one embodiment, an activatable antibody is administered to patients that are at risk of developing one or more of the aforementioned inflammation, inflammatory disorders, cancer or other disorders.

[0794] A patient's or organ's predisposition to one or more of the aforementioned disorders can be determined using genotypic, serological or biochemical markers.

[0795] In some embodiments of the disclosure, an antibody and/or an activatable antibody is administered to human individuals diagnosed with a clinical indication associated with one or more of the aforementioned disorders. Upon diagnosis, an antibody and/or an activatable antibody is administered to mitigate or reverse the effects of the clinical indication.

[0796] Antibodies and/or activatable antibodies of the disclosure are also useful in the detection of the target in patient samples and accordingly are useful as diagnostics. For example, the antibodies and/or activatable antibodies of the disclosure are used in in vitro assays, e.g., ELISA, to detect target levels in a patient sample.

[0797] In some embodiments, anti-PDL1 antibodies are used as a diagnostic for patients who are more likely to respond favorably to treatment with an anti-PD-1 antibody and/or activatable antibody of the disclosure. In these embodiments, PD-L1 expression in tumor biopsies on both tumor cells and infiltrating immune cells and PD-L1 expression on immune cells in blood are used to indicate the presence of active immunity and, thus, potential for suppression of T cell activity through the engagement of PD-1 by PD-L1.

[0798] In one embodiment, an antibody and/or activatable antibody of the disclosure is immobilized on a solid support (e.g., the well(s) of a microtiter plate). The immobilized antibody and/or activatable antibody serves as a capture antibody for any target that can be present in a test sample. Prior to contacting the immobilized antibody and/or activatable antibody with a patient sample, the solid support is rinsed and treated with a blocking agent such as milk protein or albumin to prevent nonspecific adsorption of the analyte.

[0799] Subsequently the wells are treated with a test sample suspected of containing the antigen, or with a solution containing a standard amount of the antigen. Such a sample is, e.g., a serum sample from a subject suspected of having levels of circulating antigen considered to be diagnostic of a pathology. After rinsing away the test sample or standard, the solid support is treated with a second antibody that is detectably labeled. The labeled second antibody serves as a detecting antibody. The level of detectable label is measured, and the concentration of target antigen in the test sample is determined by comparison with a standard curve developed from the standard samples.

[0800] It will be appreciated that based on the results obtained using the antibodies and/or activatable antibodies of the disclosure in an in vitro diagnostic assay, it is possible to stage a disease in a subject based on expression levels of the target antigen. For a given disease, samples of blood are taken from subjects diagnosed as being at various stages in the progression of the disease, and/or at various points in the therapeutic treatment of the disease. Using a population of samples that provides statistically significant results for each stage of progression or therapy, a range of concentrations of the antigen that can be considered characteristic of each stage is designated.

[0801] Antibodies, conjugated antibodies, activatable antibodies and/or conjugated activatable antibodies can also be used in diagnostic and/or imaging methods. In some embodiments, such methods are in vitro methods. In some embodiments, such methods are in vivo methods. In some embodiments, such methods are in situ methods. In some embodiments, such methods are ex vivo methods. For example, activatable antibodies having an enzymatically cleavable CM can be used to detect the presence or absence of an enzyme that is capable of cleaving the CM. Such activatable antibodies can be used in diagnostics, which can include in vivo detection (e.g., qualitative or quantitative) of enzyme activity (or, in some embodiments, an environment of increased reduction potential such as that which can provide for reduction of a disulfide bond) through measured accumulation of activated antibodies (i.e., antibodies resulting from cleavage of an activatable antibody) in a given cell or tissue of a given host organism. Such accumulation of activated antibodies indicates not only that the tissue expresses enzymatic activity (or an increased reduction potential depending on the nature of the CM) but also that the tissue expresses target to which the activated antibody binds.

[0802] For example, the CM can be selected to be a protease substrate for a protease found at the site of a tumor, at the site of a viral or bacterial infection at a biologically confined site (e.g., such as in an abscess, in an organ, and the like), and the like. The AB can be one that binds a target antigen. Using methods familiar to one skilled in the art, a detectable label (e.g., a fluorescent label or radioactive label or radiotracer) can be conjugated to an AB or other region of an activatable antibody. Suitable detectable labels are discussed in the context of the above screening methods and additional specific examples are provided below. Using an AB specific to a protein or peptide of the disease state, along with a protease whose activity is elevated in the disease tissue of interest, activatable antibodies will exhibit an increased rate of binding to disease tissue relative to tissues where the CM specific enzyme is not present at a detectable level or is present at a lower level than in disease tissue or is inactive (e.g., in zymogen form or in complex with an inhibitor). Since small proteins and peptides are rapidly cleared from the blood by the renal filtration system, and because the enzyme specific for the CM is not present at a detectable level (or is present at lower levels in non-disease tissues or is present in inactive conformation), accumulation of activated antibodies in the disease tissue is enhanced relative to non-disease tissues.

[0803] In another example, activatable antibodies can be used to detect the presence or absence of a cleaving agent in a sample. For example, where the activatable antibodies contain a CM susceptible to cleavage by an enzyme, the activatable antibodies can be used to detect (either qualitatively or quantitatively) the presence of an enzyme in the sample. In another example, where the activatable antibodies contain a CM susceptible to cleavage by reducing agent, the activatable antibodies can be used to detect (either qualitatively or quantitatively) the presence of reducing conditions in a sample. To facilitate analysis in these methods, the activatable antibodies can be detectably labeled, and can be bound to a support (e.g., a solid support, such as a slide or bead). The detectable label can be positioned on a portion of the activatable antibody that is not released following cleavage, for example, the detectable label can be a quenched fluorescent label or other label that is not detectable until cleavage has occurred. The assay can be conducted by, for example, contacting the immobilized, detectably labeled activatable antibodies with a sample suspected of containing an enzyme and/or reducing agent for a time sufficient for cleavage to occur, then washing to remove excess sample and contaminants. The presence or absence of the cleaving agent (e.g., enzyme or reducing agent) in the sample is then assessed by a change in detectable signal of the activatable antibodies prior to contacting with the sample e.g., the presence of and/or an increase in detectable signal due to cleavage of the activatable antibody by the cleaving agent in the sample.

[0804] Such detection methods can be adapted to also provide for detection of the presence or absence of a target that is capable of binding the AB of the activatable antibodies when cleaved. Thus, the assays can be adapted to assess the presence or absence of a cleaving agent and the presence or absence of a target of interest. The presence or absence of the cleaving agent can be detected by the presence of and/or an increase in detectable label of the activatable antibodies as described above, and the presence or absence of the target can be detected by detection of a target-AB complex e.g., by use of a detectably labeled anti-target antibody.

[0805] Activatable antibodies are also useful in in situ imaging for the validation of activatable antibody activation, e.g., by protease cleavage, and binding to a particular target. In situ imaging is a technique that enables localization of proteolytic activity and target in biological samples such as cell cultures or tissue sections. Using this technique, it is possible to confirm both binding to a given target and proteolytic activity based on the presence of a detectable label (e.g., a fluorescent label).

[0806] These techniques are useful with any frozen cells or tissue derived from a disease site (e.g. tumor tissue) or healthy tissues. These techniques are also useful with fresh cell or tissue samples.

[0807] In these techniques, an activatable antibody is labeled with a detectable label. The detectable label can be a fluorescent dye, (e.g. Fluorescein Isothiocyanate (FITC), Rhodamine Isothiocyanate (TRITC), a near infrared (NIR) dye (e.g., Qdot® nanocrystals), a colloidal metal, a hapten, a radioactive marker, biotin and an amplification reagent such as streptavidin, or an enzyme (e.g. horseradish peroxidase or alkaline phosphatase).

[0808] Detection of the label in a sample that has been incubated with the labeled, activatable antibody indicates that the sample contains the target and contains a protease that is specific for the CM of the activatable antibody. In some embodiments, the presence of the protease can be confirmed using broad spectrum protease inhibitors such as those described herein, and/or by using an agent that is specific for the protease, for example, an antibody such as A11, which is specific for the protease matriptase and inhibits the proteolytic activity of matriptase; see e.g., International Publication Number WO 2010/129609, published 11 Nov. 2010. The same approach of using broad spectrum protease inhibitors such as those described herein, and/or by using a more selective inhibitory agent can be used to identify a protease or class of proteases specific for the CM of the activatable antibody. In some embodiments, the presence of the target can be confirmed using an agent that is specific for the target, e.g., another antibody, or the detectable label can be competed with unlabeled target. In some embodiments, unlabeled activatable antibody could be used, with detection by a labeled secondary antibody or more complex detection system.

[0809] Similar techniques are also useful for in vivo imaging where detection of the fluorescent signal in a subject, e.g., a mammal, including a human, indicates that the disease site contains the target and contains a protease that is specific for the CM of the activatable antibody.

[0810] These techniques are also useful in kits and/or as reagents for the detection, identification or characterization of protease activity in a variety of cells, tissues, and organisms based on the protease-specific CM in the activatable antibody.

[0811] In some embodiments, in situ imaging and/or in vivo imaging are useful in methods to identify which patients to treat. For example, in in situ imaging, the activatable antibodies are used to screen patient samples to identify those patients having the appropriate protease(s) and target(s) at the appropriate location, e.g., at a tumor site.

[0812] In some embodiments in situ imaging is used to identify or otherwise refine a patient population suitable for treatment with an activatable antibody of the disclosure. For example, patients that test positive for both the target and a protease that cleaves the substrate in the cleavable moiety (CM) of the activatable antibody being tested (e.g., accumulate activated antibodies at the disease site) are identified as suitable candidates for treatment with such an activatable antibody comprising such a CM. Likewise, patients that test negative for either or both of the target and the protease that cleaves the substrate in the CM in the activatable antibody being tested using these methods are identified as suitable candidates for another form of therapy (i.e., not suitable for treatment with the activatable antibody being tested). In some embodiments, such patients that test negative with respect to a first activatable antibody can be tested with other activatable antibodies comprising different CMs until a suitable activatable antibody for treatment is identified (e.g., an activatable antibody comprising a CM that is cleaved by the patient at the site of disease).

[0813] In some embodiments in vivo imaging is used to identify or otherwise refine a patient population suitable for treatment with an activatable antibody of the disclosure. For example, patients that test positive for both the target and a protease that cleaves the substrate in the cleavable moiety (CM) of the activatable antibody being tested (e.g., accumulate activated antibodies at the disease site) are identified as suitable candidates for treatment with such an activatable antibody comprising such a CM. Likewise, patients that test negative are identified as suitable candidates for another form of therapy (i.e., not suitable for treatment with the activatable antibody being tested). In some embodiments, such patients that test negative with respect to a first activatable antibody can be tested with other activatable antibodies comprising different CMs until a suitable activatable antibody for treatment is identified (e.g., an activatable antibody comprising a CM that is cleaved by the patient at the site of disease).

[0814] Pharmaceutical Compositions

[0815] The antibodies and/or activatable antibodies of the disclosure (also referred to herein as “active compounds”), and derivatives, fragments, analogs and homologs thereof, can be incorporated into pharmaceutical compositions suitable for administration. Such compositions typically comprise the antibody and/or activatable antibody and a pharmaceutically acceptable carrier. As used herein, the term “pharmaceutically acceptable carrier” is intended to include any and all solvents, dispersion media, coatings, antibacterial and antifungal agents, isotonic and absorption delaying agents, and the like, compatible with pharmaceutical administration. Suitable carriers are described in the most recent edition of Remington's Pharmaceutical Sciences, a standard reference text in the field, which is incorporated herein by reference. Suitable examples of such carriers or diluents include, but are not limited to, water, saline, ringer's solutions, dextrose solution, and 5% human serum albumin. Liposomes and non-aqueous vehicles such as fixed oils can also be used. The use of such media and agents for pharmaceutically active substances is well known in the art. Except insofar as any conventional media or agent is incompatible with the active compound, use thereof in the compositions is contemplated. Supplementary active compounds can also be incorporated into the compositions.

[0816] A pharmaceutical composition of the disclosure is formulated to be compatible with its intended route of administration. Examples of routes of administration include parenteral, e.g., intravenous, intradermal, subcutaneous, oral (e.g., inhalation), transdermal (i.e., topical), transmucosal, and rectal administration. Solutions or suspensions used for parenteral, intradermal, or subcutaneous application can include the following components: a sterile diluent such as water for injection, saline solution, fixed oils, polyethylene glycols, glycerine, propylene glycol or other synthetic solvents; antibacterial agents such as benzyl alcohol or methyl parabens; antioxidants such as ascorbic acid or sodium bisulfite; chelating agents such as ethylenediaminetetraacetic acid (EDTA); buffers such as acetates, citrates or phosphates, and agents for the adjustment of tonicity such as sodium chloride or dextrose. The pH can be adjusted with acids or bases, such as hydrochloric acid or sodium hydroxide. The parenteral preparation can be enclosed in ampoules, disposable syringes or multiple dose vials made of glass or plastic.

[0817] Pharmaceutical compositions suitable for injectable use include sterile aqueous solutions (where water soluble) or dispersions and sterile powders for the extemporaneous preparation of sterile injectable solutions or dispersion. For intravenous administration, suitable carriers include physiological saline, bacteriostatic water, Cremophor EL™ (BASF, Parsippany, N.J.) or phosphate buffered saline (PBS). In all cases, the composition must be sterile and should be fluid to the extent that easy syringeability exists. It must be stable under the conditions of manufacture and storage and must be preserved against the contaminating action of microorganisms such as bacteria and fungi. The carrier can be a solvent or dispersion medium containing, for example, water, ethanol, polyol (for example, glycerol, propylene glycol, and liquid polyethylene glycol, and the like), and suitable mixtures thereof. The proper fluidity can be maintained, for example, by the use of a coating such as lecithin, by the maintenance of the required particle size in the case of dispersion and by the use of surfactants. Prevention of the action of microorganisms can be achieved by various antibacterial and antifungal agents, for example, parabens, chlorobutanol, phenol, ascorbic acid, thimerosal, and the like. In some embodiments, it will be desirable to include isotonic agents, for example, sugars, polyalcohols such as manitol, sorbitol, sodium chloride in the composition. Prolonged absorption of the injectable compositions can be brought about by including in the composition an agent that delays absorption, for example, aluminum monostearate and gelatin.

[0818] Sterile injectable solutions can be prepared by incorporating the active compound in the required amount in an appropriate solvent with one or a combination of ingredients enumerated above, as required, followed by filtered sterilization. Generally, dispersions are prepared by incorporating the active compound into a sterile vehicle that contains a basic dispersion medium and the required other ingredients from those enumerated above. In the case of sterile powders for the preparation of sterile injectable solutions, methods of preparation are vacuum drying and freeze-drying that yields a powder of the active ingredient plus any additional desired ingredient from a previously sterile-filtered solution thereof.

[0819] Oral compositions generally include an inert diluent or an edible carrier. They can be enclosed in gelatin capsules or compressed into tablets. For the purpose of oral therapeutic administration, the active compound can be incorporated with excipients and used in the form of tablets, troches, or capsules. Oral compositions can also be prepared using a fluid carrier for use as a mouthwash, wherein the compound in the fluid carrier is applied orally and swished and expectorated or swallowed. Pharmaceutically compatible binding agents, and/or adjuvant materials can be included as part of the composition. The tablets, pills, capsules, troches and the like can contain any of the following ingredients, or compounds of a similar nature: a binder such as microcrystalline cellulose, gum tragacanth or gelatin; an excipient such as starch or lactose, a disintegrating agent such as alginic acid, Primogel, or corn starch; a lubricant such as magnesium stearate or Sterotes; a glidant such as colloidal silicon dioxide; a sweetening agent such as sucrose or saccharin; or a flavoring agent such as peppermint, methyl salicylate, or orange flavoring.

[0820] For administration by inhalation, the compounds are delivered in the form of an aerosol spray from pressured container or dispenser that contains a suitable propellant, e.g., a gas such as carbon dioxide, or a nebulizer.

[0821] Systemic administration can also be by transmucosal or transdermal means. For transmucosal or transdermal administration, penetrants appropriate to the barrier to be permeated are used in the formulation. Such penetrants are generally known in the art, and include, for example, for transmucosal administration, detergents, bile salts, and fusidic acid derivatives. Transmucosal administration can be accomplished through the use of nasal sprays or suppositories. For transdermal administration, the active compounds are formulated into ointments, salves, gels, or creams as generally known in the art.

[0822] The compounds can also be prepared in the form of suppositories (e.g., with conventional suppository bases such as cocoa butter and other glycerides) or retention enemas for rectal delivery.

[0823] In one embodiment, the active compounds are prepared with carriers that will protect the compound against rapid elimination from the body, such as a controlled release formulation, including implants and microencapsulated delivery systems. Biodegradable, biocompatible polymers can be used, such as ethylene vinyl acetate, polyanhydrides, polyglycolic acid, collagen, polyorthoesters, and polylactic acid. Methods for preparation of such formulations will be apparent to those skilled in the art. The materials can also be obtained commercially from Alza Corporation and Nova Pharmaceuticals, Inc. Liposomal suspensions (including liposomes targeted to infected cells with monoclonal antibodies to viral antigens) can also be used as pharmaceutically acceptable carriers. These can be prepared according to methods known to those skilled in the art, for example, as described in U.S. Pat. No. 4,522,811.

[0824] It is especially advantageous to formulate oral or parenteral compositions in dosage unit form for ease of administration and uniformity of dosage. Dosage unit form as used herein refers to physically discrete units suited as unitary dosages for the subject to be treated; each unit containing a predetermined quantity of active compound calculated to produce the desired therapeutic effect in association with the required pharmaceutical carrier. The specification for the dosage unit forms of the disclosure are dictated by and directly dependent on the unique characteristics of the active compound and the particular therapeutic effect to be achieved, and the limitations inherent in the art of compounding such an active compound for the treatment of individuals.

[0825] The pharmaceutical compositions can be included in a container, pack, or dispenser together with instructions for administration.

[0826] The invention will be further described in the following examples, which do not limit the scope of the invention described in the claims.

### EXAMPLES

### Example 1

### Generation of Mouse Antibodies of the Embodiments that Bind Human PD-1 and Block hPD-L1 and hPD-L2 Binding to Human PD-1

[0827] This example demonstrates mouse antibodies of the disclosure that bind human PD-1 can be isolated from hybridomas derived from mouse immunization with recombinant human PD-1 protein, and that such binding can inhibit PD-1 binding to PDL1 and PDL2.

[0828] Six NZBWF1/J female mice (Jackson Laboratories, Sacramento, Calif.; cat#100008) were immunized in the right flank with recombinant human PD-1 (Sino Biological, Beijing, P.R. China; cat# ABIN2181605) on days 0, 7 and 21. Serum was taken from immunized mice on day 28 and binding to HEK293-hPD-1 (cells transfected with an expression vector encoding human PD-1 (Origene, cat# SC117011)) was measured. All six mice showed positive binding. Splenocytes were isolated from mouse 1, 3 and 6 and fused with SP0 mouse B-cells; likewise splenocytes were isolated from mouse 2, 4 and 5 and fused with SP0 mouse B-cells, giving rise to pools of hybridomas, m136 and m245. The hybridoma pools, m136 and m245, arising from the two fusions were plated for single clones, and clonal culture supernatants were assayed for antibodies capable of binding to HEK293-hPD-1, and not to un-transfected HEK293, cells. Hybridoma clones expressing anti-PD-1 antibodies were chosen for further analysis.

[0829] The sequences of the antibodies used in the studies presented herein are shown below:

m136-M13-MHC723 mIgG1/K
MHC723HC.1 Variable heavy chain region amino acid sequence:

(SEQ ID NO: 1)

EVKLVESGGGLVKPGGSLKLSCAASGFTFSGYAMSWVRQTPAKRLEWVAY
ISNSGGNAHYPDSVKGRFTISRDNAKNTLYLQMSSLRSEDTAMYYCTRED
YGTSPFVYWGQGTLVTVSA

MHC723HC.1 Variable heavy chain region nucleic acid sequence:

(SEQ ID NO: 2)

GAAGTGAAGCTGGTGGAGTCTGGGGGAGGCTTAGTGAAACCTGGAGGGTC
CCTGAAACTCTCCTGTGCAGCCTCTGGATTCACTTTCAGTGGCTATGCCA
TGTCTTGGGTTCGCCAGACTCCGGCGAAGAGGCTGGAGTGGGTCGCATAC
ATTAGTAATAGTGGTGGTAACGCCCACTATCCAGACAGTGTAAAGGGCCG
ATTCACCATCTCCAGAGACAATGCCAAGAACACCCTATACCTGCAAATGA
GCAGTCTGAGGTCTGAGGACACGGCCATGTATTACTGTACAAGAGAGGAC
TACGGTACTAGTCCTTTTGTTTACTGGGGCCAAGGGACTCTGGTCACTGT
CTCTGCA

MHC723LC.3 Variable light chain region amino acid sequence:

(SEQ ID NO: 3)

DIVLTQSPASLAVSLGQRTTISCRASESVDNYGISFMNWFQQKPGQPPKL
LIYAASNQGSGVPARFSGSGSGTDFSLNIHPMEEDDTAVYFCQQSKDVPW
TFGGGTKLEIR

MHC723LC.3 Variable light chain region nucleic acid sequence:

(SEQ ID NO: 4)

GACATTGTGCTGACCCAATCTCCAGCTTCTTTGGCTGTGTCTCTTGGGCA
GAGGACCACCATCTCCTGCAGAGCCAGCGAAAGTGTTGATAATTATGGCA
TTAGTTTTATGAACTGGTTCCAACAGAAACCAGGACAGCCACCCAAACTC
CTCATCTATGCTGCATCCAACCAAGGATCCGGGGTCCCTGCCAGGTTTAG
TGGCAGTGGGTCTGGGACAGACTTCAGCCTCAACATCCATCCTATGGAGG
AGGATGATACTGCAGTGTATTTCTGTCAGCAAAGTAAGGACGTTCCGTGG
ACGTTCGGTGGAGGCACCAAGCTGGAAATCAGAC

m136-M19-MHC725 mIgG2b/K
MHC725HC.2 Variable heavy chain region amino acid sequence:

(SEQ ID NO: 5)

EVQLQQSGPELVKPGDSVKMSCKASGYTFTDYYMDWVKQSHGKSLEWIGY
IYPKNGGSSYNQKFKGKATLTVDKSSSTAYMELHSLTSEDSAVYYCARKV
VATDYWGQGTTLTVSS

MHC725HC.2 Variable heavy chain region nucleic acid sequence:

(SEQ ID NO: 6)

GAGGTCCAGCTGCAACAGTCTGGACCTGAGCTGGTGAAGCCTGGGGATTC
AGTGAAGATGTCCTGCAAGGCTTCTGGCTACACATTCACTGACTACTACA
TGGACTGGGTGAAGCAGAGCCATGGAAAGAGCCTTGAGTGGATTGGATAA
TTTATCCTAAAAATGGTGGTTCCAGCTACAATCAGAAGTTCAAGGGCAAG
CCACATTGACTGTAGACAAGTCCTCCAGCACAGCCTACATGGAGCTCACA
GCCTGACATCTGAGGACTCTGCAGTCTATTACTGTGCAAGAAAGGCGTAG
CTACGGACTACTGGGGCCAAGGCACCACTCTCACAGTCTCCTCA

MHC725LC.2 Variable light chain region amino acid sequence:

(SEQ ID NO: 7)

DIVMSQSPSSLAVSVGEKVTMSCKSSQSLLYSSNQKNYLAWYQQKPGQSP
KLLIFWASIRESGVPDRFTGSGSGTDFTLTISSVKAEDRAVYYCQQCDSY
PWTFGGGTKLEIK

MHC725LC.2 Variable light chain region nucleic acid sequence:

(SEQ ID NO: 8)

GACATTGTGATGTCACAGTCTCCATCCTCCCTAGCTGTGTCAGTTGGAGA
GAAGGTTACTATGAGCTGCAAGTCCAGTCAGAGCCTTTTATATAGTAGCA
ATCAAAAGAACTACTTGGCCTGGTACCAGCAGAAACCAGGGCAGTCTCCT
AAACTGCTGATTTTCTGGGCATCTATTAGGGAATCTGGGGTCCCTGATCG
CTTCACAGGCAGTGGATCTGGGACAGATTTCACTCTCACCATCAGCAGTG
TGAAGGCTGAAGACCGGGCAGTTTATTACTGTCAGCAATGTGATAGCTAT
CCGTGGACGTTCGGTGGAGGCACCAAACTGGAAATCAAAC

m245-M3-MHC728 mIgG2a/K
MHC728HC.4 Variable heavy chain region amino acid sequence:

(SEQ ID NO: 9)

EVKLVESGGGLVKPGGSLKLSCAASGFTFSNYAMSWVRQTPAKRLEWVAY
ISNGGGDTHYPDSLKGRFTVSRDNAKNTLYLQMSSLKSEDTAMYYCAREN
YGTSPFVYWGQGTLVTVSA

MHC728HC.4 Variable heavy chain region nucleic acid sequence:

(SEQ ID NO: 10)

GAAGTGAAGCTGGTGGAGTCTGGGGGAGGCTTAGTGAAACCTGGAGGGTC
CCTGAAACTCTCCTGTGCAGCCTCTGGATTCACTTTCAGTAACTATGCCA
TGTCTTGGGTTCGCCAGACTCCGGCGAAGAGGCTGGAGTGGGTCGCATAC
ATTAGTAATGGTGGTGGTGACACCCACTATCCAGACAGTTTAAAGGGCCG
ATTCACCGTCTCCAGAGACAATGCCAAGAACACCCTGTACCTACAAATGA
GCAGTCTGAAGTCTGAGGACACGGCCATGTATTACTGTGCAAGAGAAAAC
TACGGTACTAGTCCCTTTGTTTACTGGGGCCAAGGGACTCTGGTCACTGT
CTCTGCA

MHC728LC.2 Variable light chain region amino acid sequence:

(SEQ ID NO: 11)

DIVLTQSPASLAVSLGQRATISCRASESVDNYGISFMNWFQQKPGQPPKL
LIYAASNQGSGVPARFSGSGSGTDFSLNIHPMEEDDTAMYFCQQSKDVPW
TFGGGTKLEIK

MHC728LC.2 Variable light chain region nucleic acid sequence:

(SEQ ID NO: 12)

GACATTGTGCTGACCCAATCTCCAGCTTCTTTGGCTGTGTCTCTAGGGCA
GAGGGCCACCATCTCCTGCAGAGCCAGCGAAAGTGTTGATAATTATGGCA
TTAGTTTTATGAACTGGTTCCAACAGAAACCAGGACAGCCACCCAAACTC
CTCATCTATGCTGCATCCAACCAAGGATCCGGGGTCCCTGCCAGGTTTAG
TGGCAGTGGGTCTGGGACAGACTTCAGCCTCAACATCCATCCTATGGAGG
AGGATGATACTGCAATGTATTTCTGTCAGCAAAGTAAAGATGTTCCGTGG
ACGTTCGGTGGAGGCACCAAGCTGGAAATCAAAC

m245-M5-MHC729 mIgG1/K
MHC729HC.1 Variable heavy chain region amino acid sequence:

(SEQ ID NO: 13)

EVQLVESGGGLVKSGGSLKLSCAHSGFSFSSYDMSWVRQTPAKRLEWVAT
ISGGGRYTYYPDSVKGRFTISRDNAKNTLYLQMSGLRSEDTAMYYCASNY
YGFDYWGQGTTLTVSS

MHC729HC.1 Variable heavy chain region nucleic acid sequence:

(SEQ ID NO: 14)

GAAGTGCAGCTGGTGGAGTCTGGGGGAGGCTTAGTGAAGTCTGGAGGGTC
CCTGAAACTCTCCTGTGCGCATTCTGGATTCAGTTTTAGTAGTTATGACA
TGTCTTGGGTTCGCCAGACTCCGGCGAAGAGGCTGGAGTGGGTCGCAACC
ATTAGTGGTGGTGGTCGTTACACCTACTATCCAGACAGTGTGAAGGGCCG
ATTCACCATCTCCAGAGACAATGCCAAGAACACCCTGTACCTGCAAATGA
GCGGTCTGAGGTCTGAGGACACAGCCATGTATTACTGTGCAAGTAATTAC
TACGGTTTTGACTACTGGGGCCAAGGCACCACTCTCACAGTCTCTTCA

MHC729LC.3 Variable light chain region amino acid sequence:

(SEQ ID NO: 15)

DIVMTQSHKFMSTSVGDRVSITCKASQDVGTAVAWYQQKPGQSPKLLIYW
ASTRHTGVPDRFTGSGSGTDFTLTISNVQSEDLADYFCQQYSSYPWTFGG
GTKLEIK

MHC729LC.3 Variable light chain region nucleic acid sequence:

(SEQ ID NO: 16)

GATATTGTGATGACCCAGTCTCACAAATTCATGTCCACATCAGTAGGAGA
CAGGGTCAGCATCACCTGCAAGGCCAGTCAGGATGTGGGTACTGCTGTAG
CCTGGTATCAACAGAAACCAGGGCAATCTCCTAAACTACTGATTTACTGG
GCATCCACCCGGCACACTGGAGTCCCTGATCGCTTCACGGGCAGTGGATC
TGGGACAGATTTCACTCTCACCATTAGCAATGTGCAGTCTGAAGACTTGG
CAGATTATTTCTGTCAGCAATATAGCAGCTATCCGTGGACGTTCGGTGGA
GGCACCAAGCTGGAAATCAAAC

m136-M14-MHC724 mIgG2a/K
MHC724HC.3 Variable heavy chain region amino acid sequence:

(SEQ ID NO: 17)

KVMLVESGGDLVKPGGSLKLSCAASGFTFSSYGMSWVRQTPEKRLEWVAT
ISGGGRDIYYADTVKGRFTISRDNAKNTLYLQMSSLRSEDTALYFCARLY
LGFDYWGQGTTLTVSS

MHC724HC.3 Variable heavy chain region nucleic acid sequence:

(SEQ ID NO: 18)

AAAGTGATGCTGGTGGAGTCTGGGGGAGACTTAGTGAAGCCTGGAGGGTC
CCTGAAACTCTCCTGTGCAGCCTCTGGATTCACTTTCAGTAGCTATGGCA
TGTCTTGGGTTCGCCAGACTCCGGAGAAGAGGCTGGAGTGGGTCGCAACC
ATTAGTGGTGGTGGTAGAGACATCTACTACGCAGACACTGTGAAGGGCCG
ATTCACCATCTCCAGAGACAATGCCAAGAACACCCTGTACCTACAAATGA
GCAGTCTGAGGTCTGAGGACACGGCCTTGTATTTCTGTGCAAGGCTCTAC
CTGGGGTTTGACTACTGGGGCCAAGGCACCACTCTCACAGTCTCCTCA

MHC724LC.1 Variable light chain region amino acid sequence:

(SEQ ID NO: 19)

DIQMTQSPASQSASLGESVTITCLASQTIGTWLAWYQQKPGKSPQLLIYA
ATSLADGVPSRFSGSGSGTKFSFKISSLQAEDFVSYYCQQLYSIPWTFGG
GTKLEIK

MHC724LC.1 Variable light chain region nucleic acid sequence:

(SEQ ID NO: 20)

GACATTCAGATGACCCAGTCTCCTGCCTCCCAGTCTGCATCTCTGGGAGA
AAGTGTCACCATCACATGCCTGGCAAGTCAGACCATTGGTACATGGTTAG
CATGGTATCAGCAGAAACCAGGGAAATCTCCTCAGCTCCTGATTTATGCT
GCAACCAGCTTGGCAGATGGGGTCCCATCAAGGTTCAGTGGTAGTGGATC
TGGCACAAAATTTTCTTTCAAGATCAGCAGCCTACAGGCTGAAGATTTTG
TAAGTTATTACTGTCAACAACTTTACAGTATTCCGTGGACATTCGGTGGA
GGCACCAAGCTGGAAATCAAAC

[0830] Binding of mouse antibodies m136-M13, m136-M19, m245-M3, m245-M5 and m136-M14 to human PD-1 was confirmed by ELISA (FIG. 1). Briefly, human PD-1-Fc (R and D systems, Minneapolis, Minn.) was adsorbed to the wells of a 96-well ELISA plate. Purified anti-PD-1 antibodies were applied to the plate in serial dilution and allowed to bind. Plates were washed with PBST (PBS, pH 7.2+0.05% Tween-20). Bound antibody was detected with an anti-mouse IgG-HRP conjugate (Sigma, St Louis, Mo.) and visualized with the chromogenic substrate TMB (Thermo Scientific, Rockford, Ill.). Plots were generated in Prizm (Sigma Plot) and the data were fit to a model of single site saturation binding. Anti-PD-1 antibodies nivolumab (NV1) and/or pembrolizumab (PM1) were used as positive controls in binding assays with anti-human IgG-HRP conjugate, FAb-specific (Sigma, St Louis, Mo.) for detection. The K_{d} for each antibody tested is shown in Table 10 below:

TABLE 10
K_{d} values for tested antibodies:

| Clone | K_{d}, nM |
|---|---|
| 245-M3 | 0.22 |
| 245-M5 | 0.34 |
| 136-M13 | 0.19 |
| 136-M19 | 0.23 |
| 136-M14 | 0.19 |
| NV1 nivo | 0.28 |
| PM1 pembro | 0.35 |

[0831] Binding of mouse antibodies m136-M13, m136-M19, m245-M3, m245-M5 and m136-M14 to human PD-1 inhibited PD-1 binding to PDL1 and PDL2 in an inhibition ELISA assay (FIGS. 2-3). Inhibition ELISAs were performed as follows. Human PD-1-Fc (R and D systems, Minneapolis, Minn.) was adsorbed to the wells of a 96-well ELISA plate. Purified anti-PD-1 antibodies were applied to the plate in serial dilution in the presence of 2 nM biotinylated PD-L1 or 2 nM biotinylated PDL2. Binding of biotinylated PD-L1 and PD-L2 was detected by Pierce™ Streptavidin-poly HRP conjugate (Thermo Scientific, Rockford, Ill.) and visualized with TMB. Plots were generated in Prizm (Sigma Plot) and the data were fit to a model of single site competition binding and an IC₅₀ was determined. The IC₅₀ values for the M13 and M14 antibodies are shown in Table 11 below:

TABLE 11
IC₅₀ values for antibodies tested

| IC50 (nM) | hPDL1/Fc | hPDL2/Fc |
|---|---|---|
| M13 | 3.3 | 2 |
| M14 | 4.8 | 2.8 |

### Example 2

### Production and Testing of Humanized Anti-PD-1 Antibodies

[0832] This example demonstrates that mouse antibodies of the disclosure that bind human PD-1 can be converted to humanized IgG antibodies that retain PD-1 binding and inhibition of PDL1 and PDL2 binding to PD-1.

[0833] Variable domains of the mouse anti-PD-1 antibodies produced as described in Example 1 were humanized and expressed as full length hIgG4/hKappa antibodies. Fully human IgGs anti-PD-1 antibodies were expressed from transiently transfected HEK-293 cells and purified from the culture supernatant by Protein A chromatography.

[0834] The sequences of the humanized antibodies used in the studies presented herein are shown below:

PD-1 A Hv Variable heavy chain region amino acid sequence:

(SEQ ID NO: 21)

EVQLVESGGGLVQPGGSLRLSCAASGFTFSGYAMSWVRQAPGKGLEWVAY
ISNSGGNAHYADSVKGRFTISRDNSKNTLYLQMNSLRAEDTAVYYCTRED
YGTSPFVYWGQGTLVTVSS

PD-1 A Hv Variable heavy chain region nucleic acid sequence:

(SEQ ID NO: 22)

GAAGTGCAGCTGGTGGAATCTGGCGGCGGACTGGTGCAGCCTGGCGGATC
TCTGAGACTGAGCTGTGCCGCCAGCGGCTTCACCTTTAGCGGCTACGCCA
TGAGCTGGGTGCGCCAGGCTCCTGGCAAAGGCCTGGAATGGGTGGCCTAC
ATCAGCAACAGCGGCGGCAATGCCCACTACGCCGATAGCGTGAAGGGCCG
GTTCACCATCAGCCGGGACAACAGCAAGAACACCCTGTACCTGCAGATGA
ACAGCCTGCGGGCCGAGGACACCGCCGTGTACTACTGCACCAGAGAGGAC
TACGGCACCAGCCCCTTCGTGTATTGGGGCCAGGGTACCCTCGTGACCGT
CTCCTCA

PD-1 Ab Hv Variable heavy chain region amino acid sequence:

(SEQ ID NO: 23)

EVQLVESGGGLVQPGGSLRLSCAASGFTFSGYAMSWVRQAPGKGLEWVSY
ISNSGGNAHYADSVKGRFTISRDNSKNTLYLQMNSLRAEDTAVYYCAKED
YGTSPFVYWGQGTLVTVSS

PD-1 Ab Hv Variable heavy chain region nucleic acid sequence:

(SEQ ID NO: 24)

GAAGTGCAGCTGGTGGAATCTGGCGGCGGACTGGTGCAGCCTGGCGGATC
TCTGAGACTGAGCTGTGCCGCCAGCGGCTTCACCTTTAGCGGCTACGCCA
TGAGCTGGGTGCGCCAGGCTCCTGGCAAAGGCCTGGAATGGGTGAGTTAC
ATCAGCAACAGCGGCGGCAATGCCCACTACGCCGATAGCGTGAAGGGCCG
GTTCACCATCAGCCGGGACAACAGCAAGAACACCCTGTACCTGCAGATGA
ACAGCCTGCGGGCCGAGGACACCGCCGTGTACTACTGCGCCAAGGAGGAC
TACGGCACCAGCCCCTTCGTGTATTGGGGCCAGGGTACCCTCGTGACCGT
CTCCTCA

PD-1 Ae Hv Variable heavy chain region amino acid sequence:

(SEQ ID NO: 25)

EVQLVESGGGLVQPGGSLRLSCAASGFTFSGYAMSWVRQAPGKGLEWVAY
ISNSGGNTHYADSVKGRFTISRDNSKNTLYLQMNSLRAEDTAVYYCARED
YGTSPFVYWGQGTLVTVSS

PD-1 Ae Hv Variable heavy chain region nucleic acid sequence:

(SEQ ID NO: 26)

GAAGTGCAGCTGGTGGAATCTGGCGGCGGACTGGTGCAGCCTGGCGGATC
TCTGAGACTGAGCTGTGCCGCCAGCGGCTTCACCTTTAGCGGCTACGCCA
TGAGCTGGGTGCGCCAGGCTCCTGGCAAAGGCCTGGAATGGGTGGCCTAC
ATCAGCAACAGCGGCGGCAATACCCACTACGCCGATAGCGTGAAGGGCCG
GTTCACCATCAGCCGGGACAACAGCAAGAACACCCTGTACCTGCAGATGA
ACAGCCTGCGGGCCGAGGACACCGCCGTGTACTACTGCGCCAGAGAGGAC
TACGGCACCAGCCCCTTCGTGTATTGGGGCCAGGGTACCCTCGTGACCGT
CTCCTCA

PD-1 Af Hv Variable heavy chain region amino acid sequence:

(SEQ ID NO: 27)

EVQLVESGGGLVQPGGSLRLSCAASGFTFSGYAMSWVRQAPGKGLEWVAY
ISNSGGNTHYADSLKGRFTVSRDNSKNTLYLQMNSLRAEDTAVYYCARED
YGTSPFVYWGQGTLVTVSS

PD-1 Af Hv Variable heavy chain region nucleic acid sequence:

(SEQ ID NO: 28)

GAAGTGCAGCTGGTGGAATCTGGCGGCGGACTGGTGCAGCCTGGCGGATC
TCTGAGACTGAGCTGTGCCGCCAGCGGCTTCACCTTTAGCGGCTACGCCA
TGAGCTGGGTGCGCCAGGCTCCTGGCAAAGGCCTGGAATGGGTGGCCTAC
ATCAGCAACAGCGGCGGCAATACCCACTACGCCGATAGCCTGAAGGGCCG
GTTCACCGTCAGCCGGGACAACAGCAAGAACACCCTGTACCTGCAGATGA
ACAGCCTGCGGGCCGAGGACACCGCCGTGTACTACTGCGCCAGAGAGGAC
TACGGCACCAGCCCCTTCGTGTATTGGGGCCAGGGTACCCTCGTGACCGT
CTCCTCA

PD-1 Ba Hv Variable heavy chain region amino acid sequence:

(SEQ ID NO: 29)

QVQLVQSGAEVKKPGASVKMSCKASGYTFTDYYMDWVRQAPGQGLEWIGY
IYPKNGGSSYAQKFQGRATLTVDTSTSTAYMELSSLRSEDTAVYYCARKV
VATDYWGQGTLLTVSS

PD-1 Ba Hv Variable heavy chain region nucleic acid sequence:

(SEQ ID NO: 30)

CAGGTGCAGCTGGTGCAGTCTGGCGCCGAAGTGAAGAAACCAGGCGCCAG
CGTGAAGATGAGCTGCAAGGCCAGCGGCTACACCTTCACCGACTACTACA
TGGACTGGGTGCGCCAGGCCCCTGGACAGGGACTGGAATGGATCGGCTAC
ATCTACCCCAAGAACGGCGGCAGCAGCTACGCCCAGAAGTTCCAGGGCAG
AGCCACCCTGACCGTGGACACCAGCACAAGCACCGCCTACATGGAACTGA
GCAGCCTGCGGAGCGAGGACACCGCCGTGTACTACTGCGCCAGAAAGGTG
GTGGCCACAGACTACTGGGGCCAGGGTACCCTGCTGACCGTGTCTAGT

PD-1 Bb Hv Variable heavy chain region amino acid sequence:

(SEQ ID NO: 31)

QVQLVQSGAEVKKPGASVKMSCKASGYTFTDYYMDWVRQAPGQGLEWIGY
IYPKNGGSSYAQKFQGRATLTVDKSTSTAYMELSSLRSEDTAVYYCARKV
VATDYWGQGTLLTVSS

PD-1 Bb Hv Variable heavy chain region nucleic acid sequence:

(SEQ ID NO: 32)

CAGGTGCAGCTGGTGCAGTCTGGCGCCGAAGTGAAGAAACCAGGCGCCAG
CGTGAAGATGAGCTGCAAGGCCAGCGGCTACACCTTCACCGACTACTACA
TGGACTGGGTGCGCCAGGCCCCTGGACAGGGACTGGAATGGATCGGCTAC
ATCTACCCCAAGAACGGCGGCAGCAGCTACGCCCAGAAGTTCCAGGGCAG
AGCCACCCTGACCGTGGACAAGAGCACCAGCACCGCCTACATGGAACTGA
GCAGCCTGCGGAGCGAGGACACCGCCGTGTACTACTGCGCCAGAAAGGTG
GTGGCCACAGACTACTGGGGCCAGGGTACCCTGCTGACCGTGTCTAGT

PD-1 C Hv Variable heavy chain region amino acid sequence:

(SEQ ID NO: 33)

EVQLVESGGGLVQPGGSLRLSCAASGFTFSNYAMSWVRQAPGKGLEWVAY
ISNGGGDTHYADSLKGRFTVSRDNSKNTLYLQMNSLRAEDTAVYYCAREN
YGTSPFVWGQGTLVTVSS

PD-1 C Hv Variable heavy chain region nucleic acid sequence:

(SEQ ID NO: 34)

GAAGTGCAGCTGGTGGAATCTGGCGGCGGACTGGTGCAGCCTGGCGGATC
TCTGAGACTGAGCTGTGCCGCCAGCGGCTTCACCTTCAGCAACTACGCCA
TGAGCTGGGTGCGCCAGGCCCCTGGAAAAGGCCTGGAATGGGTGGCCTAC
ATCAGCAACGGCGGAGGCGATACCCACTACGCCGATAGCCTGAAGGGCCG
GTTCACCGTGTCCAGAGACAACAGCAAGAACACCCTGTACCTGCAGATGA
ACAGCCTGCGGGCCGAGGACACCGCCGTGTACTATTGCGCCAGAGAGAAC
TACGGCACCAGCCCCTTCGTGTACTGGGGCCAGGGTACCCTCGTGACCGT
GTCCTCT

PD-1 Ca Hv Variable heavy chain region amino acid sequence:

(SEQ ID NO: 35)

EVQLVESGGGLVQPGGSLRLSCAASGFTFSNYAMSWVRQAPGKGLEWVAY
ISNQGGDTHYADSLKGRFTVSRDNSKNTLYLQMNSLRAEDTAVYYCAREN
YGTSPFVYWGQGTLVTVSS

PD-1 Ca Hv Variable heavy chain region nucleic acid sequence:

(SEQ ID NO: 36)

GAAGTGCAGCTGGTGGAATCTGGCGGCGGACTGGTGCAGCCTGGCGGATC
TCTGAGACTGAGCTGTGCCGCCAGCGGCTTCACCTTCAGCAACTACGCCA
TGAGCTGGGTGCGCCAGGCCCCTGGAAAAGGCCTGGAATGGGTGGCCTAC
ATCAGCCAAGGCGGAGGCGATACCCACTACGCCGATAGCCTGAAGGGCCG
GTTCACCGTGTCCAGAGACAACAGCAAGAACACCCTGTACCTGCAGATGA
ACAGCCTGCGGGCCGAGGACACCGCCGTGTACTATTGCGCCAGAGAGAAC
TACGGCACCAGCCCCTTCGTGTACTGGGGCCAGGGTACCCTCGTGACCGT
GTCCTCT

PD-1 D Hv Variable heavy chain region amino acid sequence:

(SEQ ID NO: 37)

EVQLVESGGGLVQPGGSLRLSCAHSGFSFSSYDMSWVRQAPGKGLEWVAT
ISGGGRYTYYADSVKGRFTISRDNSKNTLYLQMNSLRAEDTAVYYCASNY
YGFDYWGQGTLLTVSS

PD-1 D Hv Variable heavy chain region nucleic acid sequence:

(SEQ ID NO: 38)

GAAGTGCAGCTGGTGGAATCTGGCGGCGGACTGGTGCAGCCTGGCGGATC
TCTGAGACTGAGCTGTGCCCACAGCGGCTTCAGCTTCAGCAGCTACGACA
TGAGCTGGGTGCGCCAGGCCCCTGGCAAAGGACTGGAATGGGTGGCCACA
ATCAGCGGCGGAGGCCGGTACACCTACTACGCCGATAGCGTGAAGGGCCG
GTTCACCATCAGCCGGGACAACAGCAAGAACACCCTGTACCTGCAGATGA
ACAGCCTGCGGGCCGAGGACACCGCCGTGTACTACTGCGCCAGCAACTAC
TACGGCTTCGACTACTGGGGCCAGGGTACCCTGCTGACCGTGTCATCT

PD-1 1.0 Lv Variable light chain region amino acid sequence:

(SEQ ID NO: 39)

DIQLTQSPSSLSASVGDRVTITCRASESVDNYGISFMNWFQQKPGKAPKL
LIYAASNQGSGVPSRFSGSGSGTDFTLTISSMQPEDFATYYCQQSKDVPW
TFGQGTKLEIK

PD-1 1.0 Lv Variable light chain region nucleic acid sequence:

(SEQ ID NO: 40)

GACATCCAGCTGACCCAGAGCCCTAGCAGCCTGTCTGCCAGCGTGGGCGA
CAGAGTGACCATCACCTGTAGAGCCAGCGAGAGCGTGGACAACTACGGCA
TCAGCTTCATGAACTGGTTCCAGCAGAAGCCCGGCAAGGCCCCCAAGCTG
CTGATCTACGCCGCCAGCAATCAGGGCAGCGGCGTGCCAAGCAGATTTTC
CGGCTCTGGCAGCGGCACCGACTTCACCCTGACCATCAGCAGCATGCAGC
CCGAGGACTTCGCCACCTACTACTGCCAGCAGAGCAAGGACGTGCCCTGG
ACCTTTGGCCAGGGTACCAAGCTGGAAATCAAG

PD-1 1.1 Lv Variable light chain region amino acid sequence:

(SEQ ID NO: 41)

DIQLTQSPSSLSVSVGDRATITCRASESVDNYGISFMNWFQQKPGKAPKL
LIYAASNQGSGVPSRFSGSGSGTDFTLTISSMQPEDFATYYCQQSKDVPW
TFGQGTKLEIK

PD-1 1.1 Lv Variable light chain region nucleic acid sequence:

(SEQ ID NO: 42)

GACATCCAGCTGACCCAGAGCCCTAGCAGCCTGTCCGTGTCCGTGGGCGA
CAGAGCCACCATCACCTGTAGAGCCAGCGAGAGCGTGGACAACTACGGCA
TCAGCTTCATGAACTGGTTCCAGCAGAAGCCCGGCAAGGCCCCCAAGCTG
CTGATCTACGCCGCCAGCAATCAGGGCAGCGGCGTGCCAAGCAGATTTTC
CGGCTCTGGCAGCGGCACCGACTTCACCCTGACCATCAGCAGCATGCAGC
CCGAGGACTTCGCCACCTACTACTGCCAGCAGAGCAAGGACGTGCCCTGG
ACCTTTGGCCAGGGTACCAAGCTGGAAATCAAG

PD-1 1.2 Lv Variable light chain region amino acid sequence:

(SEQ ID NO: 43)

DIQLTQSPSSLSASVGDRVTITCRASESVDQYGISFMNWFQQKPGKAPKL
LIYAASNQGSGVPSRFSGSGSGTDFTLTISSMQPEDFATYYCQQSKDVPW
TFGQGTKLEIK

PD-1 1.2 Lv Variable light chain region nucleic acid sequence:

(SEQ ID NO: 44)

GACATCCAGCTGACCCAGAGCCCTAGCAGCCTGTCTGCCAGCGTGGGCGA
CAGAGTGACCATCACCTGTAGAGCCAGCGAGAGCGTGGACCAATACGGCA
TCAGCTTCATGAACTGGTTCCAGCAGAAGCCCGGCAAGGCCCCCAAGCTG
CTGATCTACGCCGCCAGCAATCAGGGCAGCGGCGTGCCAAGCAGATTTTC
CGGCTCTGGCAGCGGCACCGACTTCACCCTGACCATCAGCAGCATGCAGC
CCGAGGACTTCGCCACCTACTACTGCCAGCAGAGCAAGGACGTGCCCTGG
ACCTTTGGCCAGGGTACCAAGCTGGAAATCAAG

PD-1 1.4 Lv Variable light chain region amino acid sequence:

(SEQ ID NO: 45)

DIQLTQSPSSLSASVGDRVTITCRASESVDSYGISFMNWFQQKPGKAPKL
LIYAASNQGSGVPSRFSGSGSGTDFTLTISSMQPEDFATYYCQQSKDVPW
TFGQGTKLEIK

PD-1 1.4 Lv Variable light chain region nucleic acid sequence:

(SEQ ID NO: 46)

GACATCCAGCTGACCCAGAGCCCTAGCAGCCTGTCTGCCAGCGTGGGCGA
CAGAGTGACCATCACCTGTAGAGCCAGCGAGAGCGTGGACAGTTACGGCA
TCAGCTTCATGAACTGGTTCCAGCAGAAGCCCGGCAAGGCCCCCAAGCTG
CTGATCTACGCCGCCAGCAATCAGGGCAGCGGCGTGCCAAGCAGATTTTC
CGGCTCTGGCAGCGGCACCGACTTCACCCTGACCATCAGCAGCATGCAGC
CCGAGGACTTCGCCACCTACTACTGCCAGCAGAGCAAGGACGTGCCCTGG
ACCTTTGGCCAGGGTACCAAGCTGGAAATCAAG

PD-1 1.5 Lv Variable light chain region amino acid sequence:

(SEQ ID NO: 47)

DIQLTQSPSSLSASVGDRVTITCRASESVDAYGISFMNWFQQKPGKAPKL
LIYAASNQGSGVPSRFSGSGSGTDFTLTISSMQPEDFATYYCQQSKDVPW
TFGQGTKLEIK

PD-1 1.5 Lv Variable light chain region nucleic acid sequence:

(SEQ ID NO: 48)

GACATCCAGCTGACCCAGAGCCCTAGCAGCCTGTCTGCCAGCGTGGGCGA
CAGAGTGACCATCACCTGTAGAGCCAGCGAGAGCGTGGACGCTTACGGCA
TCAGCTTCATGAACTGGTTCCAGCAGAAGCCCGGCAAGGCCCCCAAGCTG
CTGATCTACGCCGCCAGCAATCAGGGCAGCGGCGTGCCAAGCAGATTTTC
CGGCTCTGGCAGCGGCACCGACTTCACCCTGACCATCAGCAGCATGCAGC
CCGAGGACTTCGCCACCTACTACTGCCAGCAGAGCAAGGACGTGCCCTGG
ACCTTTGGCCAGGGTACCAAGCTGGAAATCAAG

PD-1 1.6 Lv Variable light chain region amino acid sequence:

(SEQ ID NO: 49)

DIQLTQSPSSLSASVGDRVTITCRASESVDNYGISFMNWFQQKPGKAPKL
LIYAASDQGSGVPSRFSGSGSGTDFTLTISSMQPEDFATYYCQQSKDVPW
TFGQGTKLEIK

PD-1 1.6 Lv Variable light chain region nucleic acid sequence:

(SEQ ID NO: 50)

GACATCCAGCTGACCCAGAGCCCTAGCAGCCTGTCTGCCAGCGTGGGCGA
CAGAGTGACCATCACCTGTAGAGCCAGCGAGAGCGTGGACAACTACGGCA
TCAGCTTCATGAACTGGTTCCAGCAGAAGCCCGGCAAGGCCCCCAAGCTG
CTGATCTACGCCGCCAGCGATCAGGGCAGCGGCGTGCCAAGCAGATTTTC
CGGCTCTGGCAGCGGCACCGACTTCACCCTGACCATCAGCAGCATGCAGC
CCGAGGACTTCGCCACCTACTACTGCCAGCAGAGCAAGGACGTGCCCTGG
ACCTTTGGCCAGGGTACCAAGCTGGAAATCAAG

PD-1 1.7 Lv Variable light chain region amino acid sequence:

(SEQ ID NO: 51)

DIQLTQSPSSLSVSVGDRATITCRASESVDAYGISFMNWFQQKPGKAPKL
LIYAASNQGSGVPSRFSGSGSGTDFTLTISSMQPEDFATYYCQQSKDVPW
TFGQGTKLEIK

PD-1 1.7 Lv Variable light chain region nucleic acid sequence:

(SEQ ID NO: 52)

GACATCCAGCTGACCCAGAGCCCTAGCAGCCTGTCCGTGTCCGTGGGCGA
CAGAGCCACCATCACCTGTAGAGCCAGCGAGAGCGTGGACGCTTACGGCA
TCAGCTTCATGAACTGGTTCCAGCAGAAGCCCGGCAAGGCCCCCAAGCTG
CTGATCTACGCCGCCAGCAATCAGGGCAGCGGCGTGCCAAGCAGATTTTC
CGGCTCTGGCAGCGGCACCGACTTCACCCTGACCATCAGCAGCATGCAGC
CCGAGGACTTCGCCACCTACTACTGCCAGCAGAGCAAGGACGTGCCCTGG
ACCTTTGGCCAGGGTACCAAGCTGGAAATCAAG

PD-1 1.9 Lv Variable light chain region amino acid sequence:

(SEQ ID NO: 53)

DIQLTQSPSSLSASVGDRVTITCRASESVDAYGISFMNWFQQKPGKAPKL
LIYAASNQGSGVPSRFSGSGSGTDFTLTISSMQPEDFATYYCQQSKDVPW
TFGQGTKVEIK

PD-1 1.9 Lv Variable light chain region nucleic acid sequence:

(SEQ ID NO: 54)

GACATCCAGCTGACCCAGAGCCCTAGCAGCCTGTCTGCCAGCGTGGGCGA
CAGAGTGACCATCACCTGTAGAGCCAGCGAGAGCGTGGACGCTTACGGCA
TCAGCTTCATGAACTGGTTCCAGCAGAAGCCCGGCAAGGCCCCCAAGCTG
CTGATCTACGCCGCCAGCAATCAGGGCAGCGGCGTGCCAAGCAGATTTTC
CGGCTCTGGCAGCGGCACCGACTTCACCCTGACCATCAGCAGCATGCAGC
CCGAGGACTTCGCCACCTACTACTGCCAGCAGAGCAAGGACGTGCCCTGG
ACCTTTGGCCAGGGTACCAAGGTGGAAATCAAG

PD-1 1.10 Lv Variable light chain region amino acid sequence:

(SEQ ID NO: 55)

DIQLTQSPSSLSASVGDRVTITCRASESVDAYGISFMNWFQQKPGKAPKL
LIYAASNQGSGVPSRFSGSGSGTDFTLTISSMQPEDFATYYCQQSKDVPY
TFGQGTKLEIK

PD-1 1.10 Lv Variable light chain region nucleic acid sequence:

(SEQ ID NO: 56)

GACATCCAGCTGACCCAGAGCCCTAGCAGCCTGTCTGCCAGCGTGGGCGA
CAGAGTGACCATCACCTGTAGAGCCAGCGAGAGCGTGGACGCTTACGGCA
TCAGCTTCATGAACTGGTTCCAGCAGAAGCCCGGCAAGGCCCCCAAGCTG
CTGATCTACGCCGCCAGCAATCAGGGCAGCGGCGTGCCAAGCAGATTTTC
CGGCTCTGGCAGCGGCACCGACTTCACCCTGACCATCAGCAGCATGCAGC
CCGAGGACTTCGCCACCTACTACTGCCAGCAGAGCAAGGACGTGCCCTAC
ACCTTTGGCCAGGGTACCAAGCTGGAAATCAAG

PD-1 2 Lv Variable light chain region amino acid sequence:

(SEQ ID NO: 57)

DIQMTQSPSSLSASVGDRVTMTCKSSQSLLYSSNQKNYLAWYQQKPGKAP
KLLIFWASIRESGVPSRFSGSGSGTDFTLTISSVQPEDFATYYCQQSDSY
PWTFGQGTKLEIK

PD-1 2 Lv Variable light chain region nucleic acid sequence:

(SEQ ID NO: 58)

GACATCCAGATGACCCAGAGCCCCAGCAGCCTGTCTGCCAGCGTGGGCGA
TAGAGTGACCATGACCTGCAAGAGCAGCCAGAGCCTGCTGTACTCCAGCA
ACCAGAAGAACTACCTGGCCTGGTATCAGCAGAAGCCCGGCAAGGCCCCC
AAGCTGCTGATCTTCTGGGCCAGCATCCGGGAAAGCGGCGTGCCCAGCAG
ATTTTCTGGCTCTGGCAGCGGCACCGACTTCACCCTGACAATCAGCAGCG
TGCAGCCCGAGGACTTCGCCACCTACTACTGCCAGCAGAGCGACAGCTAC
CCCTGGACCTTTGGCCAGGGTACCAAGCTGGAAATCAAG

PD-1 4 Lv Variable light chain region amino acid sequence:

(SEQ ID NO: 59)

DIQMTQSPSSLSASVGDRVTITCKASQDVGTAVAWYQQKPGKAPKLLIYW
ASTRHTGVPSRFSGSGSGTDFTLTISSVQPEDFATYYCQQYSSYPWTFGQ
GTKLEIK

PD-1 4 Lv Variable light chain region nucleic acid sequence:

(SEQ ID NO: 60)

GACATCCAGATGACCCAGAGCCCCAGCAGCCTGTCTGCCAGCGTGGGCGA
CAGAGTGACCATCACATGCAAGGCCAGCCAGGACGTGGGAACAGCCGTGG
CCTGGTATCAGCAGAAGCCTGGCAAGGCCCCCAAGCTGCTGATCTACTGG
GCCAGCACCAGACACACCGGCGTGCCCAGCAGATTTTCTGGCAGCGGCTC
CGGCACCGACTTCACCCTGACAATCAGCAGCGTGCAGCCCGAGGACTTCG
CCACCTACTACTGCCAGCAGTACAGCAGCTACCCCTGGACCTTTGGCCAG
GGTACCAAGCTGGAAATCAAG

Kappa constant region amino acid sequence:

(SEQ ID NO: 61)

RTVAAPSVFIFPPSDEQLKSGTASVVCLLNNFYPREAKVQWKVDNALQSG
NSQESVTEQDSKDSTYSLSSTLTLSKADYEKHKVYACEVTHQGLSSPVTK
SFNRGEC

Kappa constant region nucleic acid sequence:

(SEQ ID NO: 62)

CGTACGGTGGCTGCACCATCTGTCTTCATCTTCCCGCCATCTGATGAGCA
GTTGAAATCTGGAACTGCCTCTGTTGTGTGCCTGCTGAATAACTTCTATC
CCAGAGAGGCCAAAGTACAGTGGAAGGTGGATAACGCCCTCCAATCGGGT
AACTCCCAGGAGAGTGTCACAGAGCAGGACAGCAAGGACAGCACCTACAG
CCTCAGCAGCACCCTGACGCTGAGCAAAGCAGACTACGAGAAACACAAAG
TCTACGCCTGCGAAGTCACCCATCAGGGCCTGAGCTCGCCCGTCACAAAG
AGCTTCAACAGGGGAGAGTGT

hIgG4 S228P amino acid sequence:

(SEQ ID NO: 63)

ASTKGPSVFPLAPCSRSTSESTAALGCLVKDYFPEPVTVSWNSGALTSGV
HTFPAVLQSSGLYSLSSVVTVPSSSLGTKTYTCNVDHKPSNTKVDKRVES
KYGPPCPPCPAPEFLGGPSVFLFPPKPKDTLMISRTPEVTCVVVDVSQED
PEVQFNWYVDGVEVHNAKTKPREEQFNSTYRVVSVLTVLHQDWLNGKEYK
CKVSNKGLPSSIEKTISKAKGQPREPQVYTLPPSQEEMTKNQVSLTCLVK
GFYPSDIAVEWESNGQPENNYKTTPPVLDSDGSFFLYSRLTVDKSRWQEG
NVFSCSVMHEALHNHYTQKSLSLSLGK

hIgG4 S228P nucleic acid sequence:

(SEQ ID NO: 64)

GCTAGCACCAAGGGCCCATCGGTCTTCCCCCTGGCACCCTGTAGCAGAAG
CACCAGCGAGTCTACAGCGGCCCTGGGCTGCCTGGTCAAGGACTACTTCC
CCGAACCGGTGACGGTGTCGTGGAACTCAGGCGCCCTGACCAGCGGCGTG
CACACCTTCCCGGCTGTCCTACAGTCCTCAGGACTCTACTCCCTCAGCAG
CGTGGTGACCGTGCCCTCCAGCAGCTTGGGCACCAAGACCTACACCTGTA
ACGTGGACCACAAGCCCAGCAACACCAAGGTGGACAAGCGGGTGGAATCT
AAGTACGGCCCTCCCTGCCCTCCTTGCCCAGCCCCTGAATTTCTGGGGGG
ACCGTCAGTCTTCCTCTTCCCCCCAAAACCCAAGGACACCCTCATGATCT
CCCGGACCCCTGAGGTCACATGCGTGGTGGTGGACGTGAGCCAGGAAGAC
CCTGAGGTCCAGTTCAACTGGTACGTGGACGGCGTGGAGGTGCATAATGC
CAAGACAAAGCCGCGGGAGGAGCAGTTCAACAGCACGTACCGTGTGGTCA
GCGTCCTCACCGTCCTGCACCAGGACTGGCTGAATGGCAAGGAGTACAAG
TGCAAGGTCTCCAACAAAGGCCTGCCCAGCTCCATCGAGAAAACCATCTC
CAAAGCCAAAGGGCAGCCCCGAGAACCACAGGTGTACACCCTGCCCCCAT
CCCAGGAGGAGATGACCAAGAACCAGGTCAGCCTGACCTGCCTGGTCAAA
GGCTTCTATCCCAGCGACATCGCCGTGGAGTGGGAGAGCAATGGGCAGCC
GGAGAACAACTACAAGACCACGCCTCCCGTGCTGGACTCCGACGGCTCCT
TCTTCCTCTACAGCAGACTCACCGTGGACAAGAGCAGGTGGCAGGAAGGG
AACGTCTTCTCATGCTCCGTGATGCATGAGGCTCTGCACAACCACTACAC
GCAGAAGAGCCTCTCCCTGTCTCTGGGTAAA

[0835] These variable heavy chain regions (VH) and variable light chain regions (VL) can be used in a variety of combinations to produce anti-PD-1 antibodies of the disclosure. For example, the antibody referred to herein as A1.0 includes the VH sequence of SEQ ID NO: 21 and the VL sequence of SEQ ID NO: 39, the A1.5 antibody includes the VH sequence of SEQ ID NO: 21 and the VL sequence of SEQ ID NO: 47; the antibody referred to herein as C1.1 includes the VH sequence of SEQ ID NO: 33 and the VL sequence of SEQ ID NO: 41, and so on.

[0836] As shown in FIGS. 4-5, humanized anti-PD-1 antibodies bound to hPD-1 in a standard ELISA in a manner similar to that of nivolumab and/or pembrolizumab, and binding of the humanized antibodies inhibited the binding of PD-1 to PDL1 and PDL2 (FIGS. 6-9) in inhibition ELISAs. ELISAs were performed as follows. For hPD-1 binding ELISAs, human PD-1-Fc (Rand D systems, Minneapolis, Minn.) was adsorbed to the wells of a 96-well ELISA plate. Purified anti-PD-1 antibodies were applied to the plate in serial dilution and allowed to bind. Bound antibody was detected with an anti-human IgG-HRP conjugate (FAb-specific) (Sigma, St Louis, Mo.) and visualized with the chromogenic substrate TMB (Thermo Scientific, Rockford, Ill.). Plots were generated in Prizm (Sigma Plot) and the data were fit to a model of single site saturation binding. For ligand inhibition ELISAs, human PD-1-Fc (R and D systems, Minneapolis, Minn.) was adsorbed to the wells of a 96-well ELISA plate. Purified anti-PD-1 antibodies were applied to the plate in serial dilution in the presence of 2 nM biotinylated hPD-L1 or 2 nM biotinylated hPD-L2. Pierce™ Streptavidin-poly HRP conjugate (Thermo Scientific, Rockford, Ill.) and visualized with TMB. Plots were generated in Prizm (Sigma Plot) and the data were fit to a model of single site competition binding and an IC₅₀ was determined.

### Example 3

### Anti-PD-1 Antibodies Shows Specificity in Binding

[0837] Example 3 shows that humanized anti-PD-1 antibody groups A1 and C1 of the disclosure bind specifically to hPD-1 by plate ELISA.

[0838] The binding of anti-PD-1 antibody A1.5 of the disclosure was highly specific to hPD-1-Fc in a standard ELISA against a panel of numerous human and mouse proteins (FIG. 10). Binding of anti-PD-1 A1.5 was detected with an anti-human IgG-HRP conjugate (FAb-specific) (Sigma, St Louis, Mo.) and visualized with the chromogenic substrate TMB (Thermo Scientific, Rockford, Ill.). Plots were generated in Prizm (Sigma Plot) and the data were fit to a model of single site saturation binding.

### Example 4

### Anti-PD-1 Epitope Binding

[0839] This example compares the epitopes bound by humanized anti-PD-1 antibodies of the disclosure, nivolumab, and pembrolizumab.

[0840] Nivolumab and pembrolizumab anti-PD-1 antibodies each bind human PD-1 and such binding by each inhibits the binding of PD-1 to PDL1 and PDL2. To map the epitopes of humanized groups A1 and C1 antibodies of the disclosure, anti-PD-1 inhibition ELISAs were performed, and compared with nivolumab and pembrolizumab inhibition. Dilution series of nivolumab, pembrolizumab, A1 and C1 antibodies were incubated in the presence of biotinylated nivolumab FAb or biotinylated pembrolizumab FAb at a concentration of 0.3 nM in a standard plate ELISA format with hPD-1-Fc (R & D systems, Minneapolis, Minn.). Binding of biotinylated FAb was detected by Pierce™ Streptavidin-poly HRP conjugate (Thermo Scientific, Rockford, Ill.) and visualized with TMB (Thermo Scientific, Rockford Ill.) and 1N HCl. Antibodies belonging to the A1 and C1 groups of the disclosure blocked biotinylated Pembrolizumab FAb binding to PD-1 similarly to Pembrolizumab antibody and more completely than nivolumab antibody (FIG. 11A). The same A1 and C1 antibodies of the disclosure blocked biotinylated nivolumab binding similarly to nivolumab antibody and more completely than pembrolizumab antibody (FIG. 11B). The data in FIGS. 11A and 11B show that A1 and C1 antibodies of the disclosure completely block both nivolumab and pembrolizumab, whereas nivolumab and pembrolizumab incompletely block each other.

### Example 5

### Anti-PD-1 A1.5 Enhances CMV-Stimulated Cytokine Secretion by PBMCs from a CMV-Positive Donor

[0841] In this example, peripheral blood mononuclear cells from a CMV-positive donor were incubated in the presence of CMV viral lysate and anti-PD-1 antibodies of the disclosure to assess the effect of such anti-PD-1 antibodies on interferon gamma (IFN-gamma, IFNg, IFN-g, IFNγ, or IFN-γ) cytokine secretion.

[0842] PBMCs from a CMV-positive donor (Hemacare) were plated at 2×10⁵ cells/well in the presence of CMV viral lysate (Astarte) and either anti-PD-1 antibody A1.5 of the disclosure or a hIgG4 isotype control antibody. After four days, supernatant was removed from each well, and IFN-gamma levels were assayed using IFN-gamma ELISA kit (Life Technologies, Carlsbad, Calif.) (FIG. 12). Anti-PD-1 antibody A1.5 increased CMV-stimulated IFN-gamma secretion compared with control hIgG4 and with potency similar to anti-PD-1 nivolumab and pembrolizumab antibodies.

### Example 6

### Anti-PD-1 Antibodies Bind to Monomeric hPD-1 with High Affinity and Slow Dissociation Kinetics

[0843] In this example, humanized anti-PD-1 antibodies of the disclosure are shown to bind with high affinity and slow dissociation to monomeric PD-1.

[0844] Activatable antibodies can be activated singly, creating a monovalent binding moiety, or doubly, creating a bivalent binding moiety. Single-arm activation of antibodies with differing avidities can favor binding and biological activity of activatable antibodies with higher monovalent affinities. Anti-PD-1 antibodies A1.5 and Bba2 of the disclosure, as well as nivolumab and pembrolizumab were immobilized at equivalent densities on Forte-Bio Octet BioLayer Inferometry (Pall ForteBio, Menlo Park, Calif.) sensors and allowed to bind to a serial dilution of human PD-1-His (R & D systems, Minneapolis, Minn.) in solution. Kinetic analysis was performed with ForteBio Data Analysis software. Results (FIG. 13) show PD-1 antibodies of the disclosure bind monomeric PD-1 with similar or higher affinities and similar or slower dissociation constants than nivolumab or pembrolizumab.

### Example 7

### Activatable Anti-PD-1 M13/A1.4/A1.5 Antibody Masking Moieties

[0845] This example describes identification of masking moieties (MM) that reduce binding of anti-PD-1 antibodies of the disclosure to their target.

[0846] Anti-PD-1 antibodies m136-M13, A1.4 and A1.5 were used to screen libraries using a method similar to that described in PCT International Publication Number WO 2010/081173, published 15 Jul. 2010. The screening consisted of one round of MACS and five rounds of FACS sorting. For the initial MACS, approximately 2×10¹¹ cells were incubated with m136-M13 antibody at a concentration of 100 nM, and 6×10⁶ binders were collected using Protein-G Dynabeads (Invitrogen). FACS rounds were conducted labeling cells with DyLight 650 (Thermo-Fisher) labeled m136-M19 antibody for FACS rounds 1-4 as follows: 100 nM FACS round 1 (F1), 10 nM FACS round 2 (F2), 2 nM FACS round 3 (F3) and 1 nM FACS round 4 (F4), with increasingly small percentages of binders as assessed by fluorescence collected at each round. For FACS round 5 (F5), cells were labeled with 1 nM DyLight 650 labeled A1.5 antibody and the brightest 0.2-4% of cells were collected. Individual peptide clones from F3, F4 and F5 were identified by sequence analysis and subsequently verified for their ability to bind DyLight-650 A1.4 or DyLight-650 A1.5.

[0847] The sequences of the anti-PD-1 m136-M13, A1.4 and A1.5 masking moieties are listed in Table 12 (masking moiety PD001 is also referred to in the disclosure as PD01 and/or PD-01; masking moiety PD002 is also referred to herein as PD02 and/or PD-02, and so on):

TABLE 12
Masking Moieties

| Mask | Amino Acid Sequence | SEQ ID NO: |
|---|---|---|
| PD001 | AMSGCSWSAFCPYLA | 66 |
| PD002 | DVNCAIWYSVCTTVP | 67 |
| PD003 | LVCPLYALSSGVCMG | 68 |
| PD004 | SVNCRIWSAVCAGYE | 69 |
| PD005 | MLVCSLQPTAMCERV | 70 |
| PD006 | APRCYMFASYCKSQY | 71 |
| PD007 | VGPCELTPKPVCNTY | 72 |
| PD008 | ETCNQYERSSGLCFA | 73 |
| PD009 | APRTCYTYQCSSFYT | 74 |
| PD010 | GLCSWYLSSSGLCVD | 75 |
| PD011 | VPWCQLTPRVMCMWA | 76 |
| PD012 | NWLDCQFYSECSVYG | 77 |
| PD013 | SCPLYVMSSFGGCWD | 78 |
| PD014 | MSHCWMFSSSCDGVK | 79 |
| PD015 | VSYCTWLIEVTCLRG | 80 |
| PD016 | VLCAAYALSSGICGG | 81 |
| PD017 | TTCNLYQQSSMFCNA | 82 |
| PD018 | APRCYMFASYCKSQY | 83 |
| PD019 | PCDQNPYFYPYVCHA | 84 |
| PD020 | SVCPMYALSSMLCGA | 85 |
| PD021 | LSVECYVFSRCSSLP | 86 |
| PD022 | FYCTYLVSLTCHPQ | 87 |
| PD023 | SMAGCQWSSFCVQRD | 88 |
| PD024 | IYSCYMFASRCTSDK | 89 |
| PD025 | SRCSVYEVSSGLCDW | 90 |
| PD026 | GMCSAYAYSSKLCTI | 91 |
| PD027 | MTTNTCNLLCQQFLT | 92 |
| PD028 | FQPCLMFASSCFTSK | 93 |
| PD029 | WNCHPAGVGPVFCEV | 94 |
| PD030 | ALCSMYLASSGLCNK | 95 |
| PD031 | NYLSCQFFQNCYETY | 96 |
| PD032 | GWCLFSDMWLGLCSA | 97 |
| PD033 | EFCARDWLPYQCSSF | 98 |
| PD034 | TSYCSIEHYPCNTHH | 99 |
| PD035 | PYICSSFPLDCQAGQ | 100 |
| PD036 | VGCEWYMSSSGMCSR | 101 |
| PD037 | EVCGGCSMQSVSCWP | 102 |
| PD038 | FTECQLSPKAICMSN | 103 |
| PD039 | KYCLFSEYVEGTCLN | 104 |
| PD040 | SGCPMYAWGWDECWR | 105 |
| PD041 | VDCPWYASSSAICSR | 106 |
| PD042 | DMLLCQIRGSCAAWG | 107 |
| PD043 | ECHPYQASASLWCGY | 108 |
| PD044 | MMMGCMWSAWCPPSR | 109 |
| PD045 | NAYFRCSLMCNMFMF | 110 |
| PD046 | ACCKESVHSVHDCKR | 111 |
| PD047 | ACIGINSYMSNYCYL | 112 |
| PD048 | ANCSFLELTNKFCTI | 113 |
| PD049 | AYCSYLMFASNPCII | 114 |
| PD050 | CFTSKCPCLCYSLLA | 115 |
| PD051 | CLCRDINCWLGCSKT | 116 |
| PD052 | CWCDIYCSPYQCSSF | 117 |
| PD053 | DCIYYYQQSANLCSY | 118 |
| PD054 | DCTGVNYYIDKHCTN | 119 |
| PD055 | DECHGYLRSSGLCGG | 120 |
| PD056 | DICSAYAASSGFCYY | 121 |
| PD057 | DIICVLTPTAWCGRT | 122 |
| PD058 | DNCCMYCSWWIACRD | 123 |
| PD059 | DSCQWYMLSADLCGT | 124 |
| PD060 | DSVCFSSSSFLCHKS | 125 |
| PD061 | DTMCAIWWTVCSGGR | 126 |
| PD062 | ECTYQTSSFHEACMS | 127 |
| PD063 | EGCNLYERSSYGCNN | 128 |
| PD064 | EGCTAFAMSAGICGG | 129 |
| PD065 | EQSCSLTPIAFCWSE | 130 |
| PD066 | EWCNAYISSSKLCST | 131 |
| PD067 | FEVCYMFASACRNGM | 132 |
| PD068 | FSCSWYAESSSLCDI | 133 |
| PD069 | FVCQMFEASSGLCGG | 134 |
| PD070 | FYCPCCMFASSCGSR | 135 |
| PD071 | FYCSYLPGASHQCSH | 136 |
| PD072 | FYCSYLYMCEVCCYE | 137 |
| PD073 | GFCTQHTVLTWCPTS | 138 |
| PD074 | GSCPSYAVSAGLCYA | 139 |
| PD075 | GSQCFLTPTAFCTHT | 140 |
| PD076 | GTCHPYMQSSKICNN | 141 |
| PD077 | GVECFVFTGGCGGYG | 142 |
| PD078 | HELCNGHWVPCCWAY | 143 |
| PD079 | ICDSYYAVSSGLCLL | 144 |
| PD080 | IGCAWYVSSAGWCSP | 145 |
| PD081 | INLCWMFASECGEHH | 146 |
| PD082 | KCWLAEMTNLEHCNM | 147 |
| PD083 | KHCSDFAYSSRLCDR | 148 |
| PD084 | KVCSSYASSSGLCGW | 149 |
| PD085 | LDSCYMFASYCVQAV | 150 |
| PD086 | LLACHPIFVTVCQTR | 151 |
| PD087 | LLSCPYNPEHVCHTS | 152 |
| PD088 | LMCSLYALSSNLCGR | 153 |
| PD089 | LMWCVLFLWSWCCRI | 154 |
| PD090 | LPICHLTPTAVCTHI | 155 |
| PD091 | LSNMCLAFGSCLYAW | 156 |
| PD092 | LSRCHPIWYTICQNP | 157 |
| PD093 | LTQCMSVHKECGGYE | 158 |
| PD094 | LVNCRIWSWVCEEAT | 159 |
| PD095 | LYCSWYQMSSAVCKE | 160 |
| PD096 | MECGWYALSARFCEV | 161 |
| PD097 | MTCSPYAMSAHFCNE | 162 |
| PD098 | MVCSLYAYSASLCGA | 163 |
| PD099 | NALCWSTFSWWCDMD | 164 |
| PD-100 | NFTCMLTPKAYCVQT | 165 |
| PD-101 | NGACIFTLSWCTNKT | 166 |
| PD-102 | NGCELYAAASGLCRT | 167 |
| PD-103 | NIECSVFGRCCCDNY | 168 |
| PD-104 | PACRPMFWNRSCDNI | 169 |
| PD-105 | PCRVSNMFFPYNCLD | 170 |
| PD-106 | PFMCMLLPESYCWIW | 171 |
| PD-107 | PQSCYMFASLCMPNG | 172 |
| PD-108 | PRCPQGLPLYQCSSF | 173 |
| PD-109 | PSVECLVFKRCYALP | 174 |
| PD-110 | PVCQRSATIYNCNWF | 175 |
| PD-111 | QCAAYYISSFGGCSN | 176 |
| PD-112 | QFGCFMLARDFCGTY | 177 |
| PD-113 | QMMCPYNPEHKCHQK | 178 |
| PD-114 | QRECWMFASSCNSKN | 179 |
| PD-115 | QSNMCTTYICSSFNY | 180 |
| PD-116 | QSRCHSLAPYLCSSF | 181 |
| PD-117 | RAYCSLLFADSCNNN | 182 |
| PD-118 | RCIGINQYIDSNCYN | 183 |
| PD-119 | RLSCFMFASQCALEF | 184 |
| PD-120 | RQCIILMNHRQCFFK | 185 |
| PD-121 | RSCTPYMMSSSLCNT | 186 |
| PD-122 | RYCHYWKMPYECSSF | 187 |
| PD-123 | SCVSLSWFDMLKCYE | 188 |
| PD-124 | SDNCEIWWTVCSAAM | 189 |
| PD-125 | SFCWSYLVSSGLCGV | 190 |
| PD-126 | SMCMNNYGTTFMCGN | 191 |
| PD-127 | SMVGCGWSTFCPSRG | 192 |
| PD-128 | SSLHCANGHTCPFCL | 193 |
| PD-129 | SVCSYYEESSGICSP | 194 |
| PD-130 | SWCGWYAASSGVCAL | 195 |
| PD-131 | TCISQTIDSYLNCVN | 196 |
| PD-132 | TFCNLYTKSSNICMS | 197 |
| PD-133 | TYCVFHEYLDNTCNN | 198 |
| PD-134 | VATGCPNLMLCGSWP | 199 |
| PD-135 | VEYCSLLLGNRCDYW | 200 |
| PD-136 | VGCNMYLMSAGLCVD | 201 |
| PD-137 | VLYCSWDSGTCVGSH | 202 |
| PD-138 | VMFSCYYLETCAPGV | 203 |
| PD-139 | VRIGLCPESCLVSGF | 204 |
| PD-140 | VTCTYYATSSSLCNT | 205 |
| PD-141 | VTGCILLPKAWCWGD | 206 |
| PD-142 | VWCSIYEYSSNLCSR | 207 |
| PD-143 | WMLECQYNNTCNNMT | 208 |
| PD-144 | WPCSPLEYYNNICNV | 209 |
| PD-145 | WTYDCHLNQTCPTYY | 210 |
| PD-146 | YCSINMYLIGGNCMY | 211 |
| PD-147 | YFCSLYANSAGFCGG | 212 |
| PD-148 | YVSCYMFSSSCPSTW | 213 |

### Example 8

### Activatable Anti-PD-1 A1.4 and A1.5 Antibodies

[0848] This example describes examples of activatable anti-PD-1 A1.4 and A1.5 antibodies of the disclosure.

[0849] Activatable anti-PD-1 A1.4 antibodies comprising an anti-PD-1 M13 masking moiety, a cleavable moiety, and an anti-PD-1 A1.4 antibody of the disclosure and activatable anti-PD-1 A1.5 antibodies comprising an anti-PD-1 M13 or an anti-PD-1 A1.5 masking moiety, a cleavable moiety selected from the group consisting of a cleavable moiety, and an anti-PD-1 A1.5 antibody were produced according to methods similar to those described in PCT Publication Nos. WO 2009/025846 and WO 2010/081173, the contents of which are hereby incorporated by reference in their entirety. In some embodiments, the cleavable moiety was selected from the group consisting of a cleavable moiety referred to herein as “2001” and comprising the sequence ISSGLLSGRSDNH (SEQ ID NO: 214) and a cleavable moiety referred to herein as “3001” and comprising the sequence AVGLLAPPGGLSGRSDNH (SEQ ID NO: 318). The amino acid and nucleic acid sequences of several activatable anti-PD-1 antibody variable domains of the disclosure are provided below. Antibodies were produced as hIgG4 containing a single amino acid substitution, 5228P (Angal, et al. 1993. Mol Immunol 30:105-8.) HC and hK LC format.

[0850] In some embodiments, the activatable antibody also includes a spacer sequence. In some embodiments, the spacer is joined directly to the MM of the activatable antibody. In some embodiments, the spacer is joined directly to the MM of the activatable antibody in the structural arrangement from N-terminus to C-terminus of spacer-MM-CM-AB. In some embodiments, the spacer joined directly to the N-terminus of MM of the activatable antibody is selected from the group consisting of QGQSGQG (SEQ ID NO: 362), QGQSGQ (SEQ ID NO: 913), QGQSG (SEQ ID NO: 914), QGQS (SEQ ID NO: 915), QGQ (SEQ ID NO: 916), QG (SEQ ID NO: 917), and Q. In some embodiments, the spacer includes at least the amino acid sequence QGQSGQG (SEQ ID NO: 362). In some embodiments, the spacer includes at least the amino acid sequence QGQSGQ (SEQ ID NO: 913). In some embodiments, the spacer includes at least the amino acid sequence QGQSG (SEQ ID NO: 914). In some embodiments, the spacer includes at least the amino acid sequence QGQS (SEQ ID NO: 915), In some embodiments, the spacer includes at least the amino acid sequence QGQ (SEQ ID NO: 916). In some embodiments, the spacer includes at least the amino acid sequence QG (SEQ ID NO: 917). In some embodiments, the spacer includes at least the amino acid residue Q. In some embodiments, the activatable antibody does not include a spacer sequence.

[0851] While the sequences shown below include the spacer sequence of SEQ ID NO: 362, those of ordinary skill in the art appreciate that the activatable anti-PD-1 antibodies of the disclosure can include any suitable spacer sequence, such as, for example, a spacer sequence selected from the group consisting of QGQSGQG (SEQ ID NO: 362), QGQSGQ (SEQ ID NO: 913), QGQSG (SEQ ID NO: 914), QGQS (SEQ ID NO: 915), QGQ (SEQ ID NO: 916), QG (SEQ ID NO: 917), and Q. Additional examples of spacers include GQSGQG (SEQ ID NO: 2042), QSGQG (SEQ ID NO: 2043), SGQG (SEQ ID NO: 2044), GQG (SEQ ID NO: 2045), QG (SEQ ID NO: 2046), and G. While the sequences shown below include the spacer sequence of SEQ ID NO: 362, those of ordinary skill in the art will also appreciate that activatable anti-PD-1 antibodies of the disclosure in some embodiments do not include a spacer sequence.

### Activatable Anti-PD-1 Variable Domains:

[0852] [spacer (SEQ ID NO: 362)] [PD-1 1.4 PD001 2001 (SEQ ID NO: 919)]

(SEQ ID NO: 215)

[QGQSGQG][AMSGCSWSAFCPYLAGGGSSGGSISSGLLSGRSDNHG
GGSDIQLTQSPSSLSASVGDRVTITCRASESVDSYGISFMNWFQQ
KPGKAPKLLIYAASNQGSGVPSRFSGSGSGTDFTLTISSMQPEDFATYY
CQQSKDVPWTFGQGTKLEIK]

PD-1 1.4 PD001 2001 amino acid sequence:

(SEQ ID NO: 1041)

AMSGCSWSAFCPYLAGGGSSGGSISSGLLSGRSDNHGGGSDIQLTQSPSS
LSASVGDRVTITCRASESVDSYGISFMNWFQQKPGKAPKLLIYAASNQGS
GVPSRFSGSGSGTDFTLTISSMQPEDFATYYCQQSKDVPWTFGQGTKLEI
K

[spacer (SEQ ID NO: 918)] [PD-1 1.4 PD001 2001 (SEQ ID NO: 920)]

(SEQ ID NO: 216)

[CAAGGCCAGTCTGGCCAAGGT][GCGATGAGTGGGTGCTCGTGGT
CTGCTTTTTGCCCGTATTTGGCGGGAGGTGGCTCGAGCGGCGGCTC
TATCTCTTCCGGACTGCTGTCCGGCAGATCCGACAATCACGGCGGAGGA
TCCGACATCCAGCTGACCCAGAGCCCTAGCAGCCTGTCTGCCAGCGTGG
GCGACAGAGTGACCATCACCTGTAGAGCCAGCGAGAGCGTGGACAGTTA
CGGCATCAGCTTCATGAACTGGTTCCAGCAGAAGCCCGGCAAGGCCCCC
AAGCTGCTGATCTACGCCGCCAGCAATCAGGGCAGCGGCGTGCCAAGCA
GATTTTCCGGCTCTGGCAGCGGCACCGACTTCACCCTGACCATCAGCAG
CATGCAGCCCGAGGACTTCGCCACCTACTACTGCCAGCAGAGCAAGGAC
GTGCCCTGGACCTTTGGCCAGGGTACCAAGCTGGAAATCAAG]

[spacer (SEQ ID NO: 362)] [PD-1 1.4 PD002 2001 (SEQ ID NO: 921)]

(SEQ ID NO: 217)

[QGQSGQG][DVNCAIWYSVCTTVPGGGSSGGSISSGLLSGRSDNHG
GGSDIQLTQSPSSLSASVGDRVTITCRASESVDSYGISFMNWFQQ
KPGKAPKLLIYAASNQGSGVPSRFSGSGSGTDFTLTISSMQPEDFATYY
CQQSKDVPWTFGQGTKLEIK]

PD-1 1.4 PD002 2001 amino acid sequence:

(SEQ ID NO: 1042)

DVNCAIWYSVCTTVPGGGSSGGSISSGLLSGRSDNHGGGSDIQLTQSPSS
LSASVGDRVTITCRASESVDSYGISFMNWFQQKPGKAPKLLIYAASNQGS
GVPSRFSGSGSGTDFTLTISSMQPEDFATYYCQQSKDVPWTFGQGTKLEI
K

[spacer (SEQ ID NO: 918)] [PD-1 1.4 PD002 2001 (SEQ ID NO: 922)]

(SEQ ID NO: 218)

[CAAGGCCAGTCTGGCCAAGGT][GATGTTAATTGCGCTATTTGGTA
TTCGGTGTGCACTACTGTTCCTGGAGGTGGCTCGAGCGGCGGCTC
TATCTCTTCCGGACTGCTGTCCGGCAGATCCGACAATCACGGCGGAGGA
TCCGACATCCAGCTGACCCAGAGCCCTAGCAGCCTGTCTGCCAGCGTGG
GCGACAGAGTGACCATCACCTGTAGAGCCAGCGAGAGCGTGGACAGTTA
CGGCATCAGCTTCATGAACTGGTTCCAGCAGAAGCCCGGCAAGGCCCCC
AAGCTGCTGATCTACGCCGCCAGCAATCAGGGCAGCGGCGTGCCAAGCA
GATTTTCCGGCTCTGGCAGCGGCACCGACTTCACCCTGACCATCAGCAG
CATGCAGCCCGAGGACTTCGCCACCTACTACTGCCAGCAGAGCAAGGAC
GTGCCCTGGACCTTTGGCCAGGGTACCAAGCTGGAAATCAAG]

[spacer (SEQ ID NO: 362)] [PD-1 1.4 PD003 2001 (SEQ ID NO: 923)]

(SEQ ID NO: 219)

[QGQSGQG][LVCPLYALSSGVCMGGGGSSGGSISSGLLSGRSDNHG
GGSDIQLTQSPSSLSASVGDRVTITCRASESVDSYGISFMNWFQQ
KPGKAPKLLIYAASNQGSGVPSRFSGSGSGTDFTLTISSMQPEDFATYY
CQQSKDVPWTFGQGTKLEIK]

PD-1 1.4 PD003 2001 amino acid sequence:

(SEQ ID NO: 1043)

LVCPLYALSSGVCMGGGGSSGGSISSGLLSGRSDNHGGGSDIQLTQSPSS
LSASVGDRVTITCRASESVDSYGISFMNWFQQKPGKAPKLLIYAASNQGS
GVPSRFSGSGSGTDFTLTISSMQPEDFATYYCQQSKDVPWTFGQGTKLEI
K

[spacer (SEQ ID NO: 918)] [PD-1 1.4 PD003 2001 (SEQ ID NO: 924)]

(SEQ ID NO: 220)

[CAAGGCCAGTCTGGCCAAGGT][TTGGTTTGCCCTTTGTATGCATT
GAGTTCTGGGGTGTGCATGGGGGGAGGTGGCTCGAGCGGCGGCTC
TATCTCTTCCGGACTGCTGTCCGGCAGATCCGACAATCACGGCGGAGGA
TCCGACATCCAGCTGACCCAGAGCCCTAGCAGCCTGTCTGCCAGCGTGG
GCGACAGAGTGACCATCACCTGTAGAGCCAGCGAGAGCGTGGACAGTTA
CGGCATCAGCTTCATGAACTGGTTCCAGCAGAAGCCCGGCAAGGCCCCC
AAGCTGCTGATCTACGCCGCCAGCAATCAGGGCAGCGGCGTGCCAAGCA
GATTTTCCGGCTCTGGCAGCGGCACCGACTTCACCCTGACCATCAGCAG
CATGCAGCCCGAGGACTTCGCCACCTACTACTGCCAGCAGAGCAAGGAC
GTGCCCTGGACCT
TTGGCCAGGGTACCAAGCTGGAAATCAAG]

[spacer (SEQ ID NO: 362)] [PD-1 1.4 PD008 2001 (SEQ ID NO: 925)]

(SEQ ID NO: 221)

[QGQSGQG][ETCNQYERSSGLCFAGGGSSGGSISSGLLSGRSDNHG
GGSDIQLTQSPSSLSASVGDRVTITCRASESVDSYGISFMNWFQQ
KPGKAPKLLIYAASNQGSGVPSRFSGSGSGTDFTLTISSMQPEDFATYY
CQQSKDVPWTFGQGTKLEIK]

PD-1 1.4 PD008 2001 amino acid sequence:

(SEQ ID NO: 1044)

ETCNQYERSSGLCFAGGGSSGGSISSGLLSGRSDNHGGGSDIQLTQSPSS
LSASVGDRVTITCRASESVDSYGISFMNWFQQKPGKAPKLLIYAASNQGS
GVPSRFSGSGSGTDFTLTISSMQPEDFATYYCQQSKDVPWTFGQGTKLEI
K

[spacer (SEQ ID NO: 918)] [PD-1 1.4 PD008 2001 (SEQ ID NO: 926)]

(SEQ ID NO: 222)

[CAAGGCCAGTCTGGCCAAGGT][GAGACTTGCAATCAGTATGAGAG
GTCGAGTGGTTTGTGCTTTGCGGGAGGTGGCTCGAGCGGCGGCTC
TATCTCTTCCGGACTGCTGTCCGGCAGATCCGACAATCACGGCGGAGGA
TCCGACATCCAGCTGACCCAGAGCCCTAGCAGCCTGTCTGCCAGCGTGG
GCGACAGAGTGACCATCACCTGTAGAGCCAGCGAGAGCGTGGACAGTTA
CGGCATCAGCTTCATGAACTGGTTCCAGCAGAAGCCCGGCAAGGCCCCC
AAGCTGCTGATCTACGCCGCCAGCAATCAGGGCAGCGGCGTGCCAAGCA
GATTTTCCGGCTCTGGCAGCGGCACCGACTTCACCCTGACCATCAGCAG
CATGCAGCCCGAGGACTTCGCCACCTACTACTGCCAGCAGAGCAAGGAC
GTGCCCTGGACCTTTGGCCAGGGTACCAAGCTGGAAATCAAG]

[spacer (SEQ ID NO: 362)] [PD-1 1.4 PD009 2001 (SEQ ID NO: 927)]

(SEQ ID NO: 223)

[QGQSGQG][APRTCYTYQCSSFYTGGGSSGGSISSGLLSGRSDNHG
GGSDIQLTQSPSSLSASVGDRVTITCRASESVDSYGISFMNWFQQ
KPGKAPKLLIYAASNQGSGVPSRFSGSGSGTDFTLTISSMQPEDFATYY
CQQSKDVPWTFGQGTKLEIK]

PD-1 1.4 PD009 2001 amino acid sequence:

(SEQ ID NO: 1045)

APRTCYTYQCSSFYTGGGSSGGSISSGLLSGRSDNHGGGSDIQLTQSPSS
LSASVGDRVTITCRASESVDSYGISFMNWFQQKPGKAPKLLIYAASNQGS
GVPSRFSGSGSGTDFTLTISSMQPEDFATYYCQQSKDVPWTFGQGTKLEI
K

[spacer (SEQ ID NO: 918)] [PD-1 1.4 PD009 2001 (SEQ ID NO: 928)]

(SEQ ID NO: 224)

[CAAGGCCAGTCTGGCCAAGGT][GCGCCGCGGACGTGCTATACGTA
TCAGTGCTCTAGTTTTTATACTGGAGGTGGCTCGAGCGGCGGCTC
TATCTCTTCCGGACTGCTGTCCGGCAGATCCGACAATCACGGCGGAGGA
TCCGACATCCAGCTGACCCAGAGCCCTAGCAGCCTGTCTGCCAGCGTGG
GCGACAGAGTGACCATCACCTGTAGAGCCAGCGAGAGCGTGGACAGTTA
CGGCATCAGCTTCATGAACTGGTTCCAGCAGAAGCCCGGCAAGGCCCCC
AAGCTGCTGATCTACGCCGCCAGCAATCAGGGCAGCGGCGTGCCAAGCA
GATTTTCCGGCTCTGGCAGCGGCACCGACTTCACCCTGACCATCAGCAG
CATGCAGCCCGAGGACTTCGCCACCTACTACTGCCAGCAGAGCAAGGAC
GTGCCCTGGACCTTTGGCCAGGGTACCAAGCTGGAAATCAAG]

[spacer (SEQ ID NO: 362)] [PD-1 1.4 PD010 2001 (SEQ ID NO: 929)]

(SEQ ID NO: 225)

[QGQSGQG][GLCSWYLSSSGLCVDGGGSSGGSISSGLLSGRSDNHG
GGSDIQLTQSPSSLSASVGDRVTITCRASESVDSYGISFMNWFQQ
KPGKAPKLLIYAASNQGSGVPSRFSGSGSGTDFTLTISSMQPEDFATYY
CQQSKDVPWTFGQGTKLEIK]

PD-1 1.4 PD010 2001 amino acid sequence:

(SEQ ID NO: 1046)

GLCSWYLSSSGLCVDGGGSSGGSISSGLLSGRSDNHGGGSDIQLTQSPSS
LSASVGDRVTITCRASESVDSYGISFMNWFQQKPGKAPKLLIYAASNQGS
GVPSRFSGSGSGTDFTLTISSMQPEDFATYYCQQSKDVPWTFGQGTKLEI
K

[spacer (SEQ ID NO: 918)] [PD-1 1.4 PD010 2001 (SEQ ID NO: 930)]

(SEQ ID NO: 226)

[CAAGGCCAGTCTGGCCAAGGT][GGTCTTTGCAGTTGGTATCT
TAGTAGTTCGGGTTTGTGCGTGGATGGAGGTGGCTCGAGCGGCGGCTCTA
TCTCTTCCGGACTGCTGTCCGGCAGATCCGACAATCACGGCGGAGGATCC
GACATCCAGCTGACCCAGAGCCCTAGCAGCCTGTCTGCCAGCGTGGGCGA
CAGAGTGACCATCACCTGTAGAGCCAGCGAGAGCGTGGACAGTTACGGCA
TCAGCTTCATGAACTGGTTCCAGCAGAAGCCCGGCAAGGCCCCCAAGCTG
CTGATCTACGCCGCCAGCAATCAGGGCAGCGGCGTGCCAAGCAGATTTTC
CGGCTCTGGCAGCGGCACCGACTTCACCCTGACCATCAGCAGCATGCAGC
CCGAGGACTTCGCCACCTACTACTGCCAGCAGAGCAAGGACGTGCCCTGG
ACCTTTGGCCAGGGTACCAAGCTGGAAATCAAG]

[spacer (SEQ ID NO: 362)] [PD-1 1.5 PD01 2001 (SEQ ID NO: 931)]

(SEQ ID NO: 227)

[QGQSGQG][AMSGCSWSAFCPYLAGGGSSGGSISSGLLSGRSD
NHGGGSDIQLTQSPSSLSASVGDRVTITCRASESVDAYGISFMNWFQQKP
GKAPKLLIYAASNQGSGVPSRFSGSGSGTDFTLTISSMQPEDFATYYCQQ
SKDVPWTFGQGTKLEIK]

PD-1 1.5 PD01 2001 amino acid sequence:

(SEQ ID NO: 1047)

AMSGCSWSAFCPYLAGGGSSGGSISSGLLSGRSDNHGGGSDIQLTQSPSS
LSASVGDRVTITCRASESVDAYGISFMNWFQQKPGKAPKLLIYAASNQGS
GVPSRFSGSGSGTDFTLTISSMQPEDFATYYCQQSKDVPWTFGQGTKLEI
K

[spacer (SEQ ID NO: 918)] [PD-1 1.5 PD001 2001 (SEQ ID NO: 932)]

(SEQ ID NO: 228)

[CAAGGCCAGTCTGGCCAAGGT][GCGATGAGTGGGTGCTCGTG
GTCTGCTTTTTGCCCGTATTTGGCGGGAGGTGGCTCGAGCGGCGGCTCTA
TCTCTTCCGGACTGCTGTCCGGCAGATCCGACAATCACGGCGGAGGATCC
GATATCCAGCTGACCCAGAGCCCTAGCAGCCTGTCTGCCAGCGTGGGCGA
CAGAGTGACCATCACCTGTAGAGCCAGCGAGAGCGTGGACGCTTACGGCA
TCAGCTTCATGAACTGGTTCCAGCAGAAGCCCGGCAAGGCCCCCAAGCTG
CTGATCTACGCCGCCAGCAATCAGGGCAGCGGCGTGCCAAGCAGATTTTC
CGGCTCTGGCAGCGGCACCGACTTCACCCTGACCATCAGCAGCATGCAGC
CCGAGGACTTCGCCACCTACTACTGCCAGCAGAGCAAGGACGTGCCCTGG
ACCTTTGGCCAGGGTACCAAGCTGGAAATCAAG]

[spacer (SEQ ID NO: 362)] [PD-1 1.5 PD002 2001 (SEQ ID NO: 933)]

(SEQ ID NO: 229)

[QGQSGQG][DVNCAIWYSVCTTVPGGGSSGGSISSGLLSGRSD
NHGGGSDIQLTQSPSSLSASVGDRVTITCRASESVDAYGISFMNWFQQKP
GKAPKLLIYAASNQGSGVPSRFSGSGSGTDFTLTISSMQPEDFATYYCQQ
SKDVPWTFGQGTKLEIK]

PD-1 1.5 PD002 2001 amino acid sequence:

(SEQ ID NO: 1048)

DVNCAIWYSVCTTVPGGGSSGGSISSGLLSGRSDNHGGGSDIQLTQSPSS
LSASVGDRVTITCRASESVDAYGISFMNWFQQKPGKAPKLLIYAASNQGS
GVPSRFSGSGSGTDFTLTISSMQPEDFATYYCQQSKDVPWTFGQGTKLEI
K

[spacer (SEQ ID NO: 918)] [PD-1 1.5 PD002 2001 (SEQ ID NO: 934)]

(SEQ ID NO: 230)

[CAAGGCCAGTCTGGCCAAGGT][GATGTTAATTGCGCTATTTG
GTATTCGGTGTGCACTACTGTTCCTGGAGGTGGCTCGAGCGGCGGCTCTA
TCTCTTCCGGACTGCTGTCCGGCAGATCCGACAATCACGGCGGAGGATCC
GATATCCAGCTGACCCAGAGCCCTAGCAGCCTGTCTGCCAGCGTGGGCGA
CAGAGTGACCATCACCTGTAGAGCCAGCGAGAGCGTGGACGCTTACGGCA
TCAGCTTCATGAACTGGTTCCAGCAGAAGCCCGGCAAGGCCCCCAAGCTG
CTGATCTACGCCGCCAGCAATCAGGGCAGCGGCGTGCCAAGCAGATTTTC
CGGCTCTGGCAGCGGCACCGACTTCACCCTGACCATCAGCAGCATGCAGC
CCGAGGACTTCGCCACCTACTACTGCCAGCAGAGCAAGGACGTGCCCTGG
ACCTTTGGCCAGGGTACCAAGCTGGAAATCAAG]

[spacer (SEQ ID NO: 362)] [PD-1 1.5 PD003 2001 (SEQ ID NO: 935)]

(SEQ ID NO: 231)

[QGQSGQG][LVCPLYALSSGVCMGGGGSSGGSISSGLLSGRSD
NHGGGSDIQLTQSPSSLSASVGDRVTITCRASESVDAYGISFMNWFQQKP
GKAPKLLIYAASNQGSGVPSRFSGSGSGTDFTLTISSMQPEDFATYYCQQ
SKDVPWTFGQGTKLEIK]

PD-1 1.5 PD003 2001 amino acid sequence:

(SEQ ID NO: 1049)

LVCPLYALSSGVCMGGGGSSGGSISSGLLSGRSDNHGGGSDIQLTQSPSS
LSASVGDRVTITCRASESVDAYGISFMNWFQQKPGKAPKLLIYAASNQGS
GVPSRFSGSGSGTDFTLTISSMQPEDFATYYCQQSKDVPWTFGQGTKLEI
K

[spacer (SEQ ID NO: 918)] [PD-1 1.5 PD003 2001 (SEQ ID NO: 936)]

(SEQ ID NO: 232)

[CAAGGCCAGTCTGGCCAAGGT][TTGGTTTGCCCTTTGTATGC
ATTGAGTTCTGGGGTGTGCATGGGGGGAGGTGGCTCGAGCGGCGGCTCTA
TCTCTTCCGGACTGCTGTCCGGCAGATCCGACAATCACGGCGGAGGATCC
GATATCCAGCTGACCCAGAGCCCTAGCAGCCTGTCTGCCAGCGTGGGCGA
CAGAGTGACCATCACCTGTAGAGCCAGCGAGAGCGTGGACGCTTACGGCA
TCAGCTTCATGAACTGGTTCCAGCAGAAGCCCGGCAAGGCCCCCAAGCTG
CTGATCTACGCCGCCAGCAATCAGGGCAGCGGCGTGCCAAGCAGATTTTC
CGGCTCTGGCAGCGGCACCGACTTCACCCTGACCATCAGCAGCATGCAGC
CCGAGGACTTCGCCACCTACTACTGCCAGCAGAGCAAGGACGTGCCCTGG
ACCTTTGGCCAGGGTACCAAGCTGGAAATCAAG]

[spacer (SEQ ID NO: 362)] [PD-1 1.5 PD004 2001 (SEQ ID NO: 937)]

(SEQ ID NO: 233)

[QGQSGQG][SVNCRIWSAVCAGYEGGGSSGGSISSGLLSGRSD
NHGGGSDIQLTQSPSSLSASVGDRVTITCRASESVDAYGISFMNWFQQKP
GKAPKLLIYAASNQGSGVPSRFSGSGSGTDFTLTISSMQPEDFATYYCQQ
SKDVPWTFGQGTKLEIK]

PD-1 1.5 PD004 2001 amino acid sequence:

(SEQ ID NO: 1050)

SVNCRIWSAVCAGYEGGGSSGGSISSGLLSGRSDNHGGGSDIQLTQSPSS
LSASVGDRVTITCRASESVDAYGISFMNWFQQKPGKAPKLLIYAASNQGS
GVPSRFSGSGSGTDFTLTISSMQPEDFATYYCQQSKDVPWTFGQGTKLEI
K

[spacer (SEQ ID NO: 918)] [PD-1 1.5 PD004 2001 (SEQ ID NO: 938)]

(SEQ ID NO: 234)

[CAAGGCCAGTCTGGCCAAGGT][TCTGTGAATTGCCGGATTTG
GTCGGCTGTTTGCGCGGGGTATGAGGGAGGTGGCTCGAGCGGCGGCTCTA
TCTCTTCCGGACTGCTGTCCGGCAGATCCGACAATCACGGCGGAGGATCC
GATATCCAGCTGACCCAGAGCCCTAGCAGCCTGTCTGCCAGCGTGGGCGA
CAGAGTGACCATCACCTGTAGAGCCAGCGAGAGCGTGGACGCTTACGGCA
TCAGCTTCATGAACTGGTTCCAGCAGAAGCCCGGCAAGGCCCCCAAGCTG
CTGATCTACGCCGCCAGCAATCAGGGCAGCGGCGTGCCAAGCAGATTTTC
CGGCTCTGGCAGCGGCACCGACTTCACCCTGACCATCAGCAGCATGCAGC
CCGAGGACTTCGCCACCTACTACTGCCAGCAGAGCAAGGACGTGCCCTGG
ACCTTTGGCCAGGGTACCAAGCTGGAAATCAAG]

[spacer (SEQ ID NO: 362)] [PD-1 1.5 PD005 2001 (SEQ ID NO: 939)]

(SEQ ID NO: 235)

[QGQSGQG][MLVCSLQPTAMCERVGGGSSGGSISSGLLSGRSD
NHGGGSDIQLTQSPSSLSASVGDRVTITCRASESVDAYGISFMNWFQQKP
GKAPKLLIYAASNQGSGVPSRFSGSGSGTDFTLTISSMQPEDFATYYCQQ
SKDVPWTFGQGTKLEIK]

PD-1 1.5 PD005 2001 amino acid sequence:

(SEQ ID NO: 1051)

MLVCSLQPTAMCERVGGGSSGGSISSGLLSGRSDNHGGGSDIQLTQSPSS
LSASVGDRVTITCRASESVDAYGISFMNWFQQKPGKAPKLLIYAASNQGS
GVPSRFSGSGSGTDFTLTISSMQPEDFATYYCQQSKDVPWTFGQGTKLEI
K

[spacer (SEQ ID NO: 918)] [PD-1 1.5 PD005 2001 (SEQ ID NO: 940)]

(SEQ ID NO: 236)

[CAAGGCCAGTCTGGCCAAGGT][ATGCTTGTGTGCTCGTTGCAGCCTAC
TGCGATGTGCGAGCGGGTGGGAGGTGGCTCGAGCGGCGGCTCTATCTCTT
CCGGACTGCTGTCCGGCAGATCCGACAATCACGGCGGAGGATCCGATATC
CAGCTGACCCAGAGCCCTAGCAGCCTGTCTGCCAGCGTGGGCGACAGAGT
GACCATCACCTGTAGAGCCAGCGAGAGCGTGGACGCTTACGGCATCAGCT
TCATGAACTGGTTCCAGCAGAAGCCCGGCAAGGCCCCCAAGCTGCTGATC
TACGCCGCCAGCAATCAGGGCAGCGGCGTGCCAAGCAGATTTTCCGGCTC
TGGCAGCGGCACCGACTTCACCCTGACCATCAGCAGCATGCAGCCCGAGG
ACTTCGCCACCTACTACTGCCAGCAGAGCAAGGACGTGCCCTGGACCTTT
GGCCAGGGTACCAAGCTGGAAATCAAG]

[spacer (SEQ ID NO: 362)] [PD-1 1.5 PD006 2001 (SEQ ID NO: 941)]

(SEQ ID NO: 237)

[QGQSGQG][APRCYMFASYCKSQYGGGSSGGSISSGLLSGRSDNHGGGS
DIQLTQSPSSLSASVGDRVTITCRASESVDAYGISFMNWFQQKPGKAPKL
LIYAASNQGSGVPSRFSGSGSGTDFTLTISSMQPEDFATYYCQQSKDVPW
TFGQGTKLEIK]

PD-1 1.5 PD006 2001 amino acid sequence:

(SEQ ID NO: 941)

APRCYMFASYCKSQYGGGSSGGSISSGLLSGRSDNHGGGSDIQLTQSPSS
LSASVGDRVTITCRASESVDAYGISFMNWFQQKPGKAPKLLIYAASNQGS
GVPSRFSGSGSGTDFTLTISSMQPEDFATYYCQQSKDVPWTFGQGTKLEI
K

[spacer (SEQ ID NO: 918)] [PD-1 1.5 PD006 2001 (SEQ ID NO: 942)]

(SEQ ID NO: 238)

[CAAGGCCAGTCTGGCCAAGGT][GCGCCTAGGTGCTATATGTTTGCGTC
GTATTGCAAGAGTCAGTATGGAGGTGGCTCGAGCGGCGGCTCTATCTCTT
CCGGACTGCTGTCCGGCAGATCCGACAATCACGGCGGAGGATCCGATATC
CAGCTGACCCAGAGCCCTAGCAGCCTGTCTGCCAGCGTGGGCGACAGAGT
GACCATCACCTGTAGAGCCAGCGAGAGCGTGGACGCTTACGGCATCAGCT
TCATGAACTGGTTCCAGCAGAAGCCCGGCAAGGCCCCCAAGCTGCTGATC
TACGCCGCCAGCAATCAGGGCAGCGGCGTGCCAAGCAGATTTTCCGGCTC
TGGCAGCGGCACCGACTTCACCCTGACCATCAGCAGCATGCAGCCCGAGG
ACTTCGCCACCTACTACTGCCAGCAGAGCAAGGACGTGCCCTGGACCTTT
GGCCAGGGTACCAAGCTGGAAATCAAG]

PD-1 1.5 PD006 2001 nucleic acid sequence:

(SEQ ID NO: 942)

GCGCCTAGGTGCTATATGTTTGCGTCGTATTGCAAGAGTCAGTATGGAGG
TGGCTCGAGCGGCGGCTCTATCTCTTCCGGACTGCTGTCCGGCAGATCCG
ACAATCACGGCGGAGGATCCGATATCCAGCTGACCCAGAGCCCTAGCAGC
CTGTCTGCCAGCGTGGGCGACAGAGTGACCATCACCTGTAGAGCCAGCGA
GAGCGTGGACGCTTACGGCATCAGCTTCATGAACTGGTTCCAGCAGAAGC
CCGGCAAGGCCCCCAAGCTGCTGATCTACGCCGCCAGCAATCAGGGCAGC
GGCGTGCCAAGCAGATTTTCCGGCTCTGGCAGCGGCACCGACTTCACCCT
GACCATCAGCAGCATGCAGCCCGAGGACTTCGCCACCTACTACTGCCAGC
AGAGCAAGGACGTGCCCTGGACCTTTGGCCAGGGTACCAAGCTGGAAATC
AAG

[spacer (SEQ ID NO: 362)] [PD-1 1.5 PD007 2001 (SEQ ID NO: 943)]

(SEQ ID NO: 239)

[QGQSGQG][VGPCELTPKPVCNTYGGGSSGGSISSGLLSGRSDNHGGGS
DIQLTQSPSSLSASVGDRVTITCRASESVDAYGISFMNWFQQKPGKAPKL
LIYAASNQGSGVPSRFSGSGSGTDFTLTISSMQPEDFATYYCQQSKDVPW
TFGQGTKLEIK]

PD-1 1.5 PD007 2001 amino acid sequence:

(SEQ ID NO: 1052)

VGPCELTPKPVCNTYGGGSSGGSISSGLLSGRSDNHGGGSDIQLTQSPSS
LSASVGDRVTITCRASESVDAYGISFMNWFQQKPGKAPKLLIYAASNQGS
GVPSRFSGSGSGTDFTLTISSMQPEDFATYYCQQSKDVPWTFGQGTKLEI
K

[spacer (SEQ ID NO: 918)] [PD-1 1.5 PD007 2001 (SEQ ID NO: 944)]

(SEQ ID NO: 240)

[CAAGGCCAGTCTGGCCAAGGT][GTGGGGCCTTGCGAGTTGACGCCGAA
GCCTGTTTGCAATACGTATGGAGGTGGCTCGAGCGGCGGCTCTATCTCTT
CCGGACTGCTGTCCGGCAGATCCGACAATCACGGCGGAGGATCCGATATC
CAGCTGACCCAGAGCCCTAGCAGCCTGTCTGCCAGCGTGGGCGACAGAGT
GACCATCACCTGTAGAGCCAGCGAGAGCGTGGACGCTTACGGCATCAGCT
TCATGAACTGGTTCCAGCAGAAGCCCGGCAAGGCCCCCAAGCTGCTGATC
TACGCCGCCAGCAATCAGGGCAGCGGCGTGCCAAGCAGATTTTCCGGCTC
TGGCAGCGGCACCGACTTCACCCTGACCATCAGCAGCATGCAGCCCGAGG
ACTTCGCCACCTACTACTGCCAGCAGAGCAAGGACGTGCCCTGGACCTTT
GGCCAGGGTACCAAGCTGGAAATCAAG]

[spacer (SEQ ID NO: 362)] [PD-1 1.5 PD008 2001 (SEQ ID NO: 945)]

(SEQ ID NO: 241)

[QGQSGQG][ETCNQYERSSGLCFAGGGSSGGSISSGLLSGRSDNHGGGS
DIQLTQSPSSLSASVGDRVTITCRASESVDAYGISFMNWFQQKPGKAPKL
LIYAASNQGSGVPSRFSGSGSGTDFTLTISSMQPEDFATYYCQQSKDVPW
TFGQGTKLEIK]

PD-1 1.5 PD008 2001 amino acid sequence:

(SEQ ID NO: 1053)

ETCNQYERSSGLCFAGGGSSGGSISSGLLSGRSDNHGGGSDIQLTQSPSS
LSASVGDRVTITCRASESVDAYGISFMNWFQQKPGKAPKLLIYAASNQGS
GVPSRFSGSGSGTDFTLTISSMQPEDFATYYCQQSKDVPWTFGQGTKLEI
K

[spacer (SEQ ID NO: 918)] [PD-1 1.5 PD008 2001 (SEQ ID NO: 946)]

(SEQ ID NO: 242)

[CAAGGCCAGTCTGGCCAAGGT][GAGACTTGCAATCAGTATGAGAGGTC
GAGTGGTTTGTGCTTTGCGGGAGGTGGCTCGAGCGGCGGCTCTATCTCTT
CCGGACTGCTGTCCGGCAGATCCGACAATCACGGCGGAGGATCCGATATC
CAGCTGACCCAGAGCCCTAGCAGCCTGTCTGCCAGCGTGGGCGACAGAGT
GACCATCACCTGTAGAGCCAGCGAGAGCGTGGACGCTTACGGCATCAGCT
TCATGAACTGGTTCCAGCAGAAGCCCGGCAAGGCCCCCAAGCTGCTGATC
TACGCCGCCAGCAATCAGGGCAGCGGCGTGCCAAGCAGATTTTCCGGCTC
TGGCAGCGGCACCGACTTCACCCTGACCATCAGCAGCATGCAGCCCGAGG
ACTTCGCCACCTACTACTGCCAGCAGAGCAAGGACGTGCCCTGGACCTTT
GGCCAGGGTACCAAGCTGGAAATCAAG]

[spacer (SEQ ID NO: 362)] [PD-1 1.5 PD009 2001 (SEQ ID NO: 947)]

(SEQ ID NO: 243)

[QGQSGQG][APRTCYTYQCSSFYTGGGSSGGSISSGLLSGRSDNHGGGS
DIQLTQSPSSLSASVGDRVTITCRASESVDAYGISFMNWFQQKPGKAPKL
LIYAASNQGSGVPSRFSGSGSGTDFTLTISSMQPEDFATYYCQQSKDVPW
TFGQGTKLEIK]

PD-1 1.5 PD009 2001 amino acid sequence:

(SEQ ID NO: 1054)

APRTCYTYQCSSFYTGGGSSGGSISSGLLSGRSDNHGGGSDIQLTQSPSS
LSASVGDRVTITCRASESVDAYGISFMNWFQQKPGKAPKLLIYAASNQGS
GVPSRFSGSGSGTDFTLTISSMQPEDFATYYCQQSKDVPWTFGQGTKLEI
K

[spacer (SEQ ID NO: 918)] [PD-1 1.5 PD009 2001 (SEQ ID NO: 948)]

(SEQ ID NO: 244)

[CAAGGCCAGTCTGGCCAAGGT][GCGCCGCGGACGTGCTATACGTATCA
GTGCTCTAGTTTTTATACTGGAGGTGGCTCGAGCGGCGGCTCTATCTCTT
CCGGACTGCTGTCCGGCAGATCCGACAATCACGGCGGAGGATCCGATATC
CAGCTGACCCAGAGCCCTAGCAGCCTGTCTGCCAGCGTGGGCGACAGAGT
GACCATCACCTGTAGAGCCAGCGAGAGCGTGGACGCTTACGGCATCAGCT
TCATGAACTGGTTCCAGCAGAAGCCCGGCAAGGCCCCCAAGCTGCTGATC
TACGCCGCCAGCAATCAGGGCAGCGGCGTGCCAAGCAGATTTTCCGGCTC
TGGCAGCGGCACCGACTTCACCCTGACCATCAGCAGCATGCAGCCCGAGG
ACTTCGCCACCTACTACTGCCAGCAGAGCAAGGACGTGCCCTGGACCTTT
GGCCAGGGTACCAAGCTGGAAATCAAG]

[spacer (SEQ ID NO: 362)] [PD-1 1.5 PD010 2001 (SEQ ID NO: 949)]

(SEQ ID NO: 245)

[QGQSGQG][GLCSWYLSSSGLCVDGGGSSGGSISSGLLSGRSDNHGGGS
DIQLTQSPSSLSASVGDRVTITCRASESVDAYGISFMNWFQQKPGKAPKL
LIYAASNQGSGVPSRFSGSGSGTDFTLTISSMQPEDFATYYCQQSKDVPW
TFGQGTKLEIK]

PD-1 1.5 PD010 2001 amino acid sequence:

(SEQ ID NO: 1055)

GLCSWYLSSSGLCVDGGGSSGGSISSGLLSGRSDNHGGGSDIQLTQSPSS
LSASVGDRVTITCRASESVDAYGISFMNWFQQKPGKAPKLLIYAASNQGS
GVPSRFSGSGSGTDFTLTISSMQPEDFATYYCQQSKDVPWTFGQGTKLEI
K

[spacer (SEQ ID NO: 918)] [PD-1 1.5 PD010 2001 (SEQ ID NO: 950)]

(SEQ ID NO: 246)

[CAAGGCCAGTCTGGCCAAGGT][GGTCTTTGCAGTTGGTATCTTAGTAG
TTCGGGTTTGTGCGTGGATGGAGGTGGCTCGAGCGGCGGCTCTATCTCTT
CCGGACTGCTGTCCGGCAGATCCGACAATCACGGCGGAGGATCCGATATC
CAGCTGACCCAGAGCCCTAGCAGCCTGTCTGCCAGCGTGGGCGACAGAGT
GACCATCACCTGTAGAGCCAGCGAGAGCGTGGACGCTTACGGCATCAGCT
TCATGAACTGGTTCCAGCAGAAGCCCGGCAAGGCCCCCAAGCTGCTGATC
TACGCCGCCAGCAATCAGGGCAGCGGCGTGCCAAGCAGATTTTCCGGCTC
TGGCAGCGGCACCGACTTCACCCTGACCATCAGCAGCATGCAGCCCGAGG
ACTTCGCCACCTACTACTGCCAGCAGAGCAAGGACGTGCCCTGGACCTTT
GGCCAGGGTACCAAGCTGGAAATCAAG]

[spacer (SEQ ID NO: 362)] [PD-1 1.5 PD011 2001 (SEQ ID NO: 951)]

(SEQ ID NO: 247)

[QGQSGQG][VPWCQLTPRVMCMWAGGGSSGGSISSGLLSGRSDNHGGGS
DIQLTQSPSSLSASVGDRVTITCRASESVDAYGISFMNWFQQKPGKAPKL
LIYAASNQGSGVPSRFSGSGSGTDFTLTISSMQPEDFATYYCQQSKDVPW
TFGQGTKLEIK]

PD-1 1.5 PD011 2001 amino acid sequence:

(SEQ ID NO: 1056)

VPWCQLTPRVMCMWAGGGSSGGSISSGLLSGRSDNHGGGSDIQLTQSPSS
LSASVGDRVTITCRASESVDAYGISFMNWFQQKPGKAPKLLIYAASNQGS
GVPSRFSGSGSGTDFTLTISSMQPEDFATYYCQQSKDVPWTFGQGTKLEI
K

[spacer (SEQ ID NO: 918)] [PD-1 1.5 PD011 2001 (SEQ ID NO: 952)]

(SEQ ID NO: 248)

[CAAGGCCAGTCTGGCCAAGGT][GTGCCTTGGTGCCAGTTGACGCCGCG
GGTTATGTGCATGTGGGCGGGAGGTGGCTCGAGCGGCGGCTCTATCTCTT
CCGGACTGCTGTCCGGCAGATCCGACAATCACGGCGGAGGATCCGATATC
CAGCTGACCCAGAGCCCTAGCAGCCTGTCTGCCAGCGTGGGCGACAGAGT
GACCATCACCTGTAGAGCCAGCGAGAGCGTGGACGCTTACGGCATCAGCT
TCATGAACTGGTTCCAGCAGAAGCCCGGCAAGGCCCCCAAGCTGCTGATC
TACGCCGCCAGCAATCAGGGCAGCGGCGTGCCAAGCAGATTTTCCGGCTC
TGGCAGCGGCACCGACTTCACCCTGACCATCAGCAGCATGCAGCCCGAGG
ACTTCGCCACCTACTACTGCCAGCAGAGCAAGGACGTGCCCTGGACCTTT
GGCCAGGGTACCAAGCTGGAAATCAAG]

[spacer (SEQ ID NO: 362)] [PD-1 1.5 PD012 2001 (SEQ ID NO: 953)]

(SEQ ID NO: 249)

[QGQSGQG][NWLDCQFYSECSVYGGGGSSGGSISSGLLSGRSDNHGGGS
DIQLTQSPSSLSASVGDRVTITCRASESVDAYGISFMNWFQQKPGKAPKL
LIYAASNQGSGVPSRFSGSGSGTDFTLTISSMQPEDFATYYCQQSKDVPW
TFGQGTKLEIK]

PD-1 1.5 PD012 2001 amino acid sequence:

(SEQ ID NO: 953)

NWLDCQFYSECSVYGGGGSSGGSISSGLLSGRSDNHGGGSDIQLTQSPSS
LSASVGDRVTITCRASESVDAYGISFMNWFQQKPGKAPKLLIYAASNQGS
GVPSRFSGSGSGTDFTLTISSMQPEDFATYYCQQSKDVPWTFGQGTKLEI
K

[spacer (SEQ ID NO: 918)] [PD-1 1.5 PD012 2001 (SEQ ID NO: 954)]

(SEQ ID NO: 250)

[CAAGGCCAGTCTGGCCAAGGT][AATTGGTTGGATTGCCAGTTTTATTC
TGAGTGCTCTGTTTATGGTGGAGGTGGCTCGAGCGGCGGCTCTATCTCTT
CCGGACTGCTGTCCGGCAGATCCGACAATCACGGCGGAGGATCCGATATC
CAGCTGACCCAGAGCCCTAGCAGCCTGTCTGCCAGCGTGGGCGACAGAGT
GACCATCACCTGTAGAGCCAGCGAGAGCGTGGACGCTTACGGCATCAGCT
TCATGAACTGGTTCCAGCAGAAGCCCGGCAAGGCCCCCAAGCTGCTGATC
TACGCCGCCAGCAATCAGGGCAGCGGCGTGCCAAGCAGATTTTCCGGCTC
TGGCAGCGGCACCGACTTCACCCTGACCATCAGCAGCATGCAGCCCGAGG
ACTTCGCCACCTACTACTGCCAGCAGAGCAAGGACGTGCCCTGGACCTTT
GGCCAGGGTACCAAGCTGGAAATCAAG]

PD-1 1.5 PD012 2001 nucleic acid sequence:

(SEQ ID NO: 954)

AATTGGTTGGATTGCCAGTTTTATTCTGAGTGCTCTGTTTATGGTGGAGG
TGGCTCGAGCGGCGGCTCTATCTCTTCCGGACTGCTGTCCGGCAGATCCG
ACAATCACGGCGGAGGATCCGATATCCAGCTGACCCAGAGCCCTAGCAGC
CTGTCTGCCAGCGTGGGCGACAGAGTGACCATCACCTGTAGAGCCAGCGA
GAGCGTGGACGCTTACGGCATCAGCTTCATGAACTGGTTCCAGCAGAAGC
CCGGCAAGGCCCCCAAGCTGCTGATCTACGCCGCCAGCAATCAGGGCAGC
GGCGTGCCAAGCAGATTTTCCGGCTCTGGCAGCGGCACCGACTTCACCCT
GACCATCAGCAGCATGCAGCCCGAGGACTTCGCCACCTACTACTGCCAGC
AGAGCAAGGACGTGCCCTGGACCTTTGGCCAGGGTACCAAGCTGGAAATC
AAG

[spacer (SEQ ID NO: 362)] [PD-1 1.5 PD013 2001 (SEQ ID NO: 955)]

(SEQ ID NO: 251)

[QGQSGQG][SCPLYVMSSFGGCWDGGGSSGGSISSGLLSGRSDNHGGGS
DIQLTQSPSSLSASVGDRVTITCRASESVDAYGISFMNWFQQKPGKAPKL
LIYAASNQGSGVPSRFSGSGSGTDFTLTISSMQPEDFATYYCQQSKDVPW
TFGQGTKLEIK]

PD-1 1.5 PD013 2001 amino acid sequence

(SEQ ID NO: 1057)

SCPLYVMSSFGGCWDGGGSSGGSISSGLLSGRSDNHGGGSDIQLTQSPSS
LSASVGDRVTITCRASESVDAYGISFMNWFQQKPGKAPKLLIYAASNQGS
GVPSRFSGSGSGTDFTLTISSMQPEDFATYYCQQSKDVPWTFGQGTKLEI
K

[spacer (SEQ ID NO: 918)] [PD-1 1.5 PD013 2001 (SEQ ID NO: 956)]

(SEQ ID NO: 252)

[CAAGGCCAGTCTGGCCAAGGT][TCGTGCCCTTTGTATGTGATGTCTAG
TTTTGGTGGGTGCTGGGATGGAGGTGGCTCGAGCGGCGGCTCTATCTCTT
CCGGACTGCTGTCCGGCAGATCCGACAATCACGGCGGAGGATCCGATATC
CAGCTGACCCAGAGCCCTAGCAGCCTGTCTGCCAGCGTGGGCGACAGAGT
GACCATCACCTGTAGAGCCAGCGAGAGCGTGGACGCTTACGGCATCAGCT
TCATGAACTGGTTCCAGCAGAAGCCCGGCAAGGCCCCCAAGCTGCTGATC
TACGCCGCCAGCAATCAGGGCAGCGGCGTGCCAAGCAGATTTTCCGGCTC
TGGCAGCGGCACCGACTTCACCCTGACCATCAGCAGCATGCAGCCCGAGG
ACTTCGCCACCTACTACTGCCAGCAGAGCAAGGACGTGCCCTGGACCTTT
GGCCAGGGTACCAAGCTGGAAATCAAG]

[spacer (SEQ ID NO: 362)] [PD-1 1.5 PD014 2001 (SEQ ID NO: 957)]

(SEQ ID NO: 253)

[QGQSGQG][MSHCWMFSSSCDGVKGGGSSGGSISSGLLSGRSDNHGGGS
DIQLTQSPSSLSASVGDRVTITCRASESVDAYGISFMNWFQQKPGKAPKL
LIYAASNQGSGVPSRFSGSGSGTDFTLTISSMQPEDFATYYCQQSKDVPW
TFGQGTKLEIK]

PD-1 1.5 PD014 2001 amino acid sequence:

(SEQ ID NO: 1058)

MSHCWMFSSSCDGVKGGGSSGGSISSGLLSGRSDNHGGGSDIQLTQSPSS
LSASVGDRVTITCRASESVDAYGISFMNWFQQKPGKAPKLLIYAASNQGS
GVPSRFSGSGSGTDFTLTISSMQPEDFATYYCQQSKDVPWTFGQGTKLEI
K

[spacer (SEQ ID NO: 918)] [PD-1 1.5 PD014 2001 (SEQ ID NO: 958)]

(SEQ ID NO: 254)

[CAAGGCCAGTCTGGCCAAGGT][ATGAGTCATTGCTGGATGTTTTCGAG
TTCTTGCGATGGGGTGAAGGGAGGTGGCTCGAGCGGCGGCTCTATCTCTT
CCGGACTGCTGTCCGGCAGATCCGACAATCACGGCGGAGGATCCGATATC
CAGCTGACCCAGAGCCCTAGCAGCCTGTCTGCCAGCGTGGGCGACAGAGT
GACCATCACCTGTAGAGCCAGCGAGAGCGTGGACGCTTACGGCATCAGCT
TCATGAACTGGTTCCAGCAGAAGCCCGGCAAGGCCCCCAAGCTGCTGATC
TACGCCGCCAGCAATCAGGGCAGCGGCGTGCCAAGCAGATTTTCCGGCTC
TGGCAGCGGCACCGACTTCACCCTGACCATCAGCAGCATGCAGCCCGAGG
ACTTCGCCACCTACTACTGCCAGCAGAGCAAGGACGTGCCCTGGACCTTT
GGCCAGGGTACCAAGCTGGAAATCAAG]

[spacer (SEQ ID NO: 362)] [PD-1 1.5 PD015 2001 (SEQ ID NO: 959)]

(SEQ ID NO: 255)

[QGQSGQG][VSYCTWLIEVTCLRGGGGSSGGSISSGLLSGRSDNHGGGS
DIQLTQSPSSLSASVGDRVTITCRASESVDAYGISFMNWFQQKPGKAPKL
LIYAASNQGSGVPSRFSGSGSGTDFTLTISSMQPEDFATYYCQQSKDVPW
TFGQGTKLEIK]

PD-1 1.5 PD015 2001 amino acid sequence:

(SEQ ID NO: 1059)

VSYCTWLIEVTCLRGGGGSSGGSISSGLLSGRSDNHGGGSDIQLTQSPSS
LSASVGDRVTITCRASESVDAYGISFMNWFQQKPGKAPKLLIYAASNQGS
GVPSRFSGSGSGTDFTLTISSMQPEDFATYYCQQSKDVPWTFGQGTKLEI
K

[spacer (SEQ ID NO: 918)] [PD-1 1.5 PD015 2001 (SEQ ID NO: 960)]

(SEQ ID NO: 256)

[CAAGGCCAGTCTGGCCAAGGT][GTTTCGTATTGCACGTGGTTGATTGA
GGTGACTTGCCTGAGGGGTGGAGGTGGCTCGAGCGGCGGCTCTATCTCTT
CCGGACTGCTGTCCGGCAGATCCGACAATCACGGCGGAGGATCCGATATC
CAGCTGACCCAGAGCCCTAGCAGCCTGTCTGCCAGCGTGGGCGACAGAGT
GACCATCACCTGTAGAGCCAGCGAGAGCGTGGACGCTTACGGCATCAGCT
TCATGAACTGGTTCCAGCAGAAGCCCGGCAAGGCCCCCAAGCTGCTGATC
TACGCCGCCAGCAATCAGGGCAGCGGCGTGCCAAGCAGATTTTCCGGCTC
TGGCAGCGGCACCGACTTCACCCTGACCATCAGCAGCATGCAGCCCGAGG
ACTTCGCCACCTACTACTGCCAGCAGAGCAAGGACGTGCCCTGGACCTTT
GGCCAGGGTACCAAGCTGGAAATCAAG]

[spacer (SEQ ID NO: 362)] [PD-1 1.5 PD016 2001 (SEQ ID NO: 961)]

(SEQ ID NO: 257)

[QGQSGQG][VLCAAYALSSGICGGGGGSSGGSISSGLLSGRSDNHGGGS
DIQLTQSPSSLSASVGDRVTITCRASESVDAYGISFMNWFQQKPGKAPKL
LIYAASNQGSGVPSRFSGSGSGTDFTLTISSMQPEDFATYYCQQSKDVPW
TFGQGTKLEIK]

PD-1 1.5 PD016 2001 amino acid sequence:

(SEQ ID NO: 1060)

VLCAAYALSSGICGGGGGSSGGSISSGLLSGRSDNHGGGSDIQLTQSPSS
LSASVGDRVTITCRASESVDAYGISFMNWFQQKPGKAPKLLIYAASNQGS
GVPSRFSGSGSGTDFTLTISSMQPEDFATYYCQQSKDVPWTFGQGTKLEI
K

[spacer (SEQ ID NO: 918)] [PD-1 1.5 PD016 2001 (SEQ ID NO: 962)]

(SEQ ID NO: 258)

[CAAGGCCAGTCTGGCCAAGGT][GTTTTGTGCGCTGCTTATGCTTTGAG
TTCGGGTATTTGCGGTGGGGGAGGTGGCTCGAGCGGCGGCTCTATCTCTT
CCGGACTGCTGTCCGGCAGATCCGACAATCACGGCGGAGGATCCGATATC
CAGCTGACCCAGAGCCCTAGCAGCCTGTCTGCCAGCGTGGGCGACAGAGT
GACCATCACCTGTAGAGCCAGCGAGAGCGTGGACGCTTACGGCATCAGCT
TCATGAACTGGTTCCAGCAGAAGCCCGGCAAGGCCCCCAAGCTGCTGATC
TACGCCGCCAGCAATCAGGGCAGCGGCGTGCCAAGCAGATTTTCCGGCTC
TGGCAGCGGCACCGACTTCACCCTGACCATCAGCAGCATGCAGCCCGAGG
ACTTCGCCACCTACTACTGCCAGCAGAGCAAGGACGTGCCCTGGACCTTT
GGCCAGGGTACCAAGCTGGAAATCAAG]

[spacer (SEQ ID NO: 362)] [PD-1 1.5 PD017 2001 (SEQ ID NO: 963)]

(SEQ ID NO: 259)

[QGQSGQG][TTCNLYQQSSMFCNAGGGSSGGSISSGLLSGRSDNHGGGS
DIQLTQSPSSLSASVGDRVTITCRASESVDAYGISFMNWFQQKPGKAPKL
LIYAASNQGSGVPSRFSGSGSGTDFTLTISSMQPEDFATYYCQQSKDVPW
TFGQGTKLEIK]

PD-1 1.5 PD017 2001 amino acid sequence:

(SEQ ID NO: 1061)

TTCNLYQQSSMFCNAGGGSSGGSISSGLLSGRSDNHGGGSDIQLTQSPSS
LSASVGDRVTITCRASESVDAYGISFMNWFQQKPGKAPKLLIYAASNQGS
GVPSRFSGSGSGTDFTLTISSMQPEDFATYYCQQSKDVPWTFGQGTKLEI
K

[spacer (SEQ ID NO: 918)] [PD-1 1.5 PD017 2001 (SEQ ID NO: 964)]

(SEQ ID NO: 260)

[CAAGGCCAGTCTGGCCAAGGT][ACGACTTGCAATCTGTATCAGCAGTC
TTCTATGTTTTGCAATGCTGGAGGTGGCTCGAGCGGCGGCTCTATCTCTT
CCGGACTGCTGTCCGGCAGATCCGACAATCACGGCGGAGGATCCGATATC
CAGCTGACCCAGAGCCCTAGCAGCCTGTCTGCCAGCGTGGGCGACAGAGT
GACCATCACCTGTAGAGCCAGCGAGAGCGTGGACGCTTACGGCATCAGCT
TCATGAACTGGTTCCAGCAGAAGCCCGGCAAGGCCCCCAAGCTGCTGATC
TACGCCGCCAGCAATCAGGGCAGCGGCGTGCCAAGCAGATTTTCCGGCTC
TGGCAGCGGCACCGACTTCACCCTGACCATCAGCAGCATGCAGCCCGAGG
ACTTCGCCACCTACTACTGCCAGCAGAGCAAGGACGTGCCCTGGACCTTT
GGCCAGGGTACCAAGCTGGAAATCAAG]

[spacer (SEQ ID NO: 362)] [PD-1 1.5 PD018 2001 (SEQ ID NO: 965)]

(SEQ ID NO: 261)

[QGQSGQG][APRCYMFASYCKSQYGGGSSGGSISSGLLSGRSDNHGGGS
DIQLTQSPSSLSASVGDRVTITCRASESVDAYGISFMNWFQQKPGKAPKL
LIYAASNQGSGVPSRFSGSGSGTDFTLTISSMQPEDFATYYCQQSKDVPW
TFGQGTKLEIK]

PD-1 1.5 PD018 2001 amino acid sequence:

(SEQ ID NO: 1062)

APRCYMFASYCKSQYGGGSSGGSISSGLLSGRSDNHGGGSDIQLTQSPSS
LSASVGDRVTITCRASESVDAYGISFMNWFQQKPGKAPKLLIYAASNQGS
GVPSRFSGSGSGTDFTLTISSMQPEDFATYYCQQSKDVPWTFGQGTKLEI
K]

[spacer (SEQ ID NO: 918)] [PD-1 1.5 PD018 2001 (SEQ ID NO: 966)]

(SEQ ID NO: 262)

[CAAGGCCAGTCTGGCCAAGGT][GCGCCTAGGTGCTATATGTTTGCGTC
GTATTGCAAGAGTCAGTATGGAGGTGGCTCGAGCGGCGGCTCTATCTCTT
CCGGACTGCTGTCCGGCAGATCCGACAATCACGGCGGAGGATCCGATATC
CAGCTGACCCAGAGCCCTAGCAGCCTGTCTGCCAGCGTGGGCGACAGAGT
GACCATCACCTGTAGAGCCAGCGAGAGCGTGGACGCTTACGGCATCAGCT
TCATGAACTGGTTCCAGCAGAAGCCCGGCAAGGCCCCCAAGCTGCTGATC
TACGCCGCCAGCAATCAGGGCAGCGGCGTGCCAAGCAGATTTTCCGGCTC
TGGCAGCGGCACCGACTTCACCCTGACCATCAGCAGCATGCAGCCCGAGG
ACTTCGCCACCTACTACTGCCAGCAGAGCAAGGACGTGCCCTGGACCTTT
GGCCAGGGTACCAAGCTGGAAATCAAG]

[spacer (SEQ ID NO: 362)] [PD-1 1.5 PD019 2001 (SEQ ID NO: 967)]

(SEQ ID NO: 263)

[QGQSGQG][PCDQNPYFYPYVCHAGGGSSGGSISSGLLSGRSDNHGGGS
DIQLTQSPSSLSASVGDRVTITCRASESVDAYGISFMNWFQQKPGKAPKL
LIYAASNQGSGVPSRFSGSGSGTDFTLTISSMQPEDFATYYCQQSKDVPW
TFGQGTKLEIK]

PD-1 1.5 PD019 2001 amino acid sequence:

(SEQ ID NO: 967)

PCDQNPYFYPYVCHAGGGSSGGSISSGLLSGRSDNHGGGSDIQLTQSPSS
LSASVGDRVTITCRASESVDAYGISFMNWFQQKPGKAPKLLIYAASNQGS
GVPSRFSGSGSGTDFTLTISSMQPEDFATYYCQQSKDVPWTFGQGTKLEI
K

[spacer (SEQ ID NO: 918)] [PD-1 1.5 PD019 2001 (SEQ ID NO: 968)]

(SEQ ID NO: 264)

[CAAGGCCAGTCTGGCCAAGGT][CCTTGCGATCAGAATCCGTATTTTTA
TCCGTATGTGTGCCATGCGGGAGGTGGCTCGAGCGGCGGCTCTATCTCTT
CCGGACTGCTGTCCGGCAGATCCGACAATCACGGCGGAGGATCCGATATC
CAGCTGACCCAGAGCCCTAGCAGCCTGTCTGCCAGCGTGGGCGACAGAGT
GACCATCACCTGTAGAGCCAGCGAGAGCGTGGACGCTTACGGCATCAGCT
TCATGAACTGGTTCCAGCAGAAGCCCGGCAAGGCCCCCAAGCTGCTGATC
TACGCCGCCAGCAATCAGGGCAGCGGCGTGCCAAGCAGATTTTCCGGCTC
TGGCAGCGGCACCGACTTCACCCTGACCATCAGCAGCATGCAGCCCGAGG
ACTTCGCCACCTACTACTGCCAGCAGAGCAAGGACGTGCCCTGGACCTTT
GGCCAGGGTACCAAGCTGGAAATCAAG]

PD-1 1.5 PD019 2001 nucleic acid sequence:

(SEQ ID NO: 968)

CCTTGCGATCAGAATCCGTATTTTTATCCGTATGTGTGCCATGCGGGAGG
TGGCTCGAGCGGCGGCTCTATCTCTTCCGGACTGCTGTCCGGCAGATCCG
ACAATCACGGCGGAGGATCCGATATCCAGCTGACCCAGAGCCCTAGCAGC
CTGTCTGCCAGCGTGGGCGACAGAGTGACCATCACCTGTAGAGCCAGCGA
GAGCGTGGACGCTTACGGCATCAGCTTCATGAACTGGTTCCAGCAGAAGC
CCGGCAAGGCCCCCAAGCTGCTGATCTACGCCGCCAGCAATCAGGGCAGC
GGCGTGCCAAGCAGATTTTCCGGCTCTGGCAGCGGCACCGACTTCACCCT
GACCATCAGCAGCATGCAGCCCGAGGACTTCGCCACCTACTACTGCCAGC
AGAGCAAGGACGTGCCCTGGACCTTTGGCCAGGGTACCAAGCTGGAAATC
AAG

[spacer (SEQ ID NO: 362)] [PD-1 1.5 PD020 2001 (SEQ ID NO: 969)]

(SEQ ID NO: 265)

[QGQSGQG][SVCPMYALSSMLCGAGGGSSGGSISSGLLSGRSDNHGGGS
DIQLTQSPSSLSASVGDRVTITCRASESVDAYGISFMNWFQQKPGKAPKL
LIYAASNQGSGVPSRFSGSGSGTDFTLTISSMQPEDFATYYCQQSKDVPW
TFGQGTKLEIK]

PD-1 1.5 PD020 2001 amino acid sequence:

(SEQ ID NO: 1063)

SVCPMYALSSMLCGAGGGSSGGSISSGLLSGRSDNHGGGSDIQLTQSPSS
LSASVGDRVTITCRASESVDAYGISFMNWFQQKPGKAPKLLIYAASNQGS
GVPSRFSGSGSGTDFTLTISSMQPEDFATYYCQQSKDVPWTFGQGTKLEI
K

[spacer (SEQ ID NO: 918)] [PD-1 1.5 PD020 2001 (SEQ ID NO: 970)]

(SEQ ID NO: 266)

[CAAGGCCAGTCTGGCCAAGGT][TCTGTGTGCCCTATGTATGCGTTGAG
TTCTATGTTGTGCGGTGCGGGAGGTGGCTCGAGCGGCGGCTCTATCTCTT
CCGGACTGCTGTCCGGCAGATCCGACAATCACGGCGGAGGATCCGATATC
CAGCTGACCCAGAGCCCTAGCAGCCTGTCTGCCAGCGTGGGCGACAGAGT
GACCATCACCTGTAGAGCCAGCGAGAGCGTGGACGCTTACGGCATCAGCT
TCATGAACTGGTTCCAGCAGAAGCCCGGCAAGGCCCCCAAGCTGCTGATC
TACGCCGCCAGCAATCAGGGCAGCGGCGTGCCAAGCAGATTTTCCGGCTC
TGGCAGCGGCACCGACTTCACCCTGACCATCAGCAGCATGCAGCCCGAGG
ACTTCGCCACCTACTACTGCCAGCAGAGCAAGGACGTGCCCTGGACCTTT
GGCCAGGGTACCAAGCTGGAAATCAAG]

[spacer (SEQ ID NO: 362)] [PD-1 1.5 PD021 2001 (SEQ ID NO: 971)]

(SEQ ID NO: 267)

[QGQSGQG][LSVECYVFSRCSSLPGGGSSGGSISSGLLSGRSDNHGGGS
DIQLTQSPSSLSASVGDRVTITCRASESVDAYGISFMNWFQQKPGKAPKL
LIYAASNQGSGVPSRFSGSGSGTDFTLTISSMQPEDFATYYCQQSKDVPW
TFGQGTKLEIK]

PD-1 1.5 PD021 2001 amino acid sequence:

(SEQ ID NO: 1064)

LSVECYVFSRCSSLPGGGSSGGSISSGLLSGRSDNHGGGSDIQLTQSPSS
LSASVGDRVTITCRASESVDAYGISFMNWFQQKPGKAPKLLIYAASNQGS
GVPSRFSGSGSGTDFTLTISSMQPEDFATYYCQQSKDVPWTFGQGTKLEI
K]

[spacer (SEQ ID NO: 918)] [PD-1 1.5 PD021 2001 (SEQ ID NO: 972)]

(SEQ ID NO: 268)

[CAAGGCCAGTCTGGCCAAGGT][TTGTCTGTGGAGTGCTATGTGTTTTC
GCGGTGCAGTAGTCTGCCGGGAGGTGGCTCGAGCGGCGGCTCTATCTCTT
CCGGACTGCTGTCCGGCAGATCCGACAATCACGGCGGAGGATCCGATATC
CAGCTGACCCAGAGCCCTAGCAGCCTGTCTGCCAGCGTGGGCGACAGAGT
GACCATCACCTGTAGAGCCAGCGAGAGCGTGGACGCTTACGGCATCAGCT
TCATGAACTGGTTCCAGCAGAAGCCCGGCAAGGCCCCCAAGCTGCTGATC
TACGCCGCCAGCAATCAGGGCAGCGGCGTGCCAAGCAGATTTTCCGGCTC
TGGCAGCGGCACCGACTTCACCCTGACCATCAGCAGCATGCAGCCCGAGG
ACTTCGCCACCTACTACTGCCAGCAGAGCAAGGACGTGCCCTGGACCTTT
GGCCAGGGTACCAAGCTGGAAATCAAG]

[spacer (SEQ ID NO: 362)] [PD-1 1.5 PD022 2001 (SEQ ID NO: 973)]

(SEQ ID NO: 269)

[QGQSGQG][FYCTYLVSLTCHPQGGGSSGGSISSGLLSGRSDNHGGGSD
IQLTQSPSSLSASVGDRVTITCRASESVDAYGISFMNWFQQKPGKAPKLL
IYAASNQGSGVPSRFSGSGSGTDFTLTISSMQPEDFATYYCQQSKDVPWT
FGQGTKLEIK]

PD-1 1.5 PD022 2001 amino acid sequence:

(SEQ ID NO: 1065)

FYCTYLVSLTCHPQGGGSSGGSISSGLLSGRSDNHGGGSDIQLTQSPSSL
SASVGDRVTITCRASESVDAYGISFMNWFQQKPGKAPKLLIYAASNQGSG
VPSRFSGSGSGTDFTLTISSMQPEDFATYYCQQSKDVPWTFGQGTKLEIK

[spacer (SEQ ID NO: 918)] [PD-1 1.5 PD022 2001 (SEQ ID NO: 974)]

(SEQ ID NO: 270)

[CAAGGCCAGTCTGGCCAAGGT][TTTTATTGCACTTATTTGGTGTCTTT
GACTTGCCATCCGCAGGGAGGTGGCTCGAGCGGCGGCTCTATCTCTTCCG
GACTGCTGTCCGGCAGATCCGACAATCACGGCGGAGGATCCGATATCCAG
CTGACCCAGAGCCCTAGCAGCCTGTCTGCCAGCGTGGGCGACAGAGTGAC
CATCACCTGTAGAGCCAGCGAGAGCGTGGACGCTTACGGCATCAGCTTCA
TGAACTGGTTCCAGCAGAAGCCCGGCAAGGCCCCCAAGCTGCTGATCTAC
GCCGCCAGCAATCAGGGCAGCGGCGTGCCAAGCAGATTTTCCGGCTCTGG
CAGCGGCACCGACTTCACCCTGACCATCAGCAGCATGCAGCCCGAGGACT
TCGCCACCTACTACTGCCAGCAGAGCAAGGACGTGCCCTGGACCTTTGGC
CAGGGTACCAAGCTGGAAATCAAG]

[spacer (SEQ ID NO: 362)] [PD-1 1.5 PD023 2001 (SEQ ID NO: 975)]

(SEQ ID NO: 271)

[QGQSGQG][SMAGCQWSSFCVQRDGGGSSGGSISSGLLSGRSDNHGGGS
DIQLTQSPSSLSASVGDRVTITCRASESVDAYGISFMNWFQQKPGKAPKL
LIYAASNQGSGVPSRFSGSGSGTDFTLTISSMQPEDFATYYCQQSKDVPW
TFGQGTKLEIK]

PD-1 1.5 PD023 2001 amino acid sequence:

(SEQ ID NO: 1066)

SMAGCQWSSFCVQRDGGGSSGGSISSGLLSGRSDNHGGGSDIQLTQSPSS
LSASVGDRVTITCRASESVDAYGISFMNWFQQKPGKAPKLLIYAASNQGS
GVPSRFSGSGSGTDFTLTISSMQPEDFATYYCQQSKDVPWTFGQGTKLEI
K

[spacer (SEQ ID NO: 918)] [PD-1 1.5 PD023 2001 (SEQ ID NO: 976)]

(SEQ ID NO: 272)

[CAAGGCCAGTCTGGCCAAGGT][TCTATGGCGGGTTGCCAGTGGAGTTC
GTTTTGCGTGCAGCGGGATGGAGGTGGCTCGAGCGGCGGCTCTATCTCTT
CCGGACTGCTGTCCGGCAGATCCGACAATCACGGCGGAGGATCCGATATC
CAGCTGACCCAGAGCCCTAGCAGCCTGTCTGCCAGCGTGGGCGACAGAGT
GACCATCACCTGTAGAGCCAGCGAGAGCGTGGACGCTTACGGCATCAGCT
TCATGAACTGGTTCCAGCAGAAGCCCGGCAAGGCCCCCAAGCTGCTGATC
TACGCCGCCAGCAATCAGGGCAGCGGCGTGCCAAGCAGATTTTCCGGCTC
TGGCAGCGGCACCGACTTCACCCTGACCATCAGCAGCATGCAGCCCGAGG
ACTTCGCCACCTACTACTGCCAGCAGAGCAAGGACGTGCCCTGGACCTTT
GGCCAGGGTACCAAGCTGGAAATCAAG]

[spacer (SEQ ID NO: 362)] [PD-1 1.5 PD024 2001 (SEQ ID NO: 977)]

(SEQ ID NO: 273)

[QGQSGQG][IYSCYMFASRCTSDKGGGSSGGSISSGLLSGRSDNHGGGS
DIQLTQSPSSLSASVGDRVTITCRASESVDAYGISFMNWFQQKPGKAPKL
LIYAASNQGSGVPSRFSGSGSGTDFTLTISSMQPEDFATYYCQQSKDVPW
TFGQGTKLEIK]

PD-1 1.5 PD024 2001 amino acid sequence:

(SEQ ID NO: 1067)

IYSCYMFASRCTSDKGGGSSGGSISSGLLSGRSDNHGGGSDIQLTQSPSS
LSASVGDRVTITCRASESVDAYGISFMNWFQQKPGKAPKLLIYAASNQGS
GVPSRFSGSGSGTDFTLTISSMQPEDFATYYCQQSKDVPWTFGQGTKLEI
K]

[spacer (SEQ ID NO: 918)] [PD-1 1.5 PD024 2001 (SEQ ID NO: 978)]

(SEQ ID NO: 274)

[CAAGGCCAGTCTGGCCAAGGT][ATTTATTCGTGCTATATGTTTGCTTC
GCGGTGCACGTCTGATAAGGGAGGTGGCTCGAGCGGCGGCTCTATCTCTT
CCGGACTGCTGTCCGGCAGATCCGACAATCACGGCGGAGGATCCGATATC
CAGCTGACCCAGAGCCCTAGCAGCCTGTCTGCCAGCGTGGGCGACAGAGT
GACCATCACCTGTAGAGCCAGCGAGAGCGTGGACGCTTACGGCATCAGCT
TCATGAACTGGTTCCAGCAGAAGCCCGGCAAGGCCCCCAAGCTGCTGATC
TACGCCGCCAGCAATCAGGGCAGCGGCGTGCCAAGCAGATTTTCCGGCTC
TGGCAGCGGCACCGACTTCACCCTGACCATCAGCAGCATGCAGCCCGAGG
ACTTCGCCACCTACTACTGCCAGCAGAGCAAGGACGTGCCCTGGACCTTT
GGCCAGGGTACCAAGCTGGAAATCAAG]

[spacer (SEQ ID NO: 362)] [PD-1 1.5 PD002 3001 (SEQ ID NO: 979)]

(SEQ ID NO: 275)

[QGQSGQG][DVNCAIWYSVCTTVPGGGSSGGAVGLLAPPGGLSGRSDNH
GGSDIQLTQSPSSLSASVGDRVTITCRASESVDAYGISFMNWFQQKPGKA
PKLLIYAASNQGSGVPSRFSGSGSGTDFTLTISSMQPEDFATYYCQQSKD
VPWTFGQGTKLEIK]

PD-1 1.5 PD002 3001 amino acid sequence:

(SEQ ID NO: 1068)

DVNCAIWYSVCTTVPGGGSSGGAVGLLAPPGGLSGRSDNHGGSDIQLTQS
PSSLSASVGDRVTITCRASESVDAYGISFMNWFQQKPGKAPKLLIYAASN
QGSGVPSRFSGSGSGTDFTLTISSMQPEDFATYYCQQSKDVPWTFGQGTK
LEIK

[spacer (SEQ ID NO: 918)] [PD-1 1.5 PD002 3001 (SEQ ID NO: 980)]

(SEQ ID NO: 276)

[CAAGGCCAGTCTGGCCAAGGT]CAAGGCCAGTCTGGCCAAGGTGATGTT
AATTGCGCTATTTGGTATTCGGTGTGCACTACTGTTCCTGGAGGTGGCTC
GAGCGGCGGCTCTATCTCTTCCGGACTGCTGTCCGGCAGATCCGACAATC
ACGGCGGAGGATCCGGAGGTGGCTCGAGCGGCGGCGCTGTGGGACTGCTG
GCTCCTCCTGGTGGCCTGTCTGGCAGATCTGATAACCACGGAGGATCCGA
TATCCAGCTGACCCAGAGCCCTAGCAGCCTGTCTGCCAGCGTGGGCGACA
GAGTGACCATCACCTGTAGAGCCAGCGAGAGCGTGGACGCTTACGGCATC
AGCTTCATGAACTGGTTCCAGCAGAAGCCCGGCAAGGCCCCCAAGCTGCT
GATCTACGCCGCCAGCAATCAGGGCAGCGGCGTGCCAAGCAGATTTTCCG
GCTCTGGCAGCGGCACCGACTTCACCCTGACCATCAGCAGCATGCAGCCC
GAGGACTTCGCCACCTACTACTGCCAGCAGAGCAAGGACGTGCCCTGGAC
CTTTGGCCAGGGTACCAAGCTGGAAATCAAG]

[spacer (SEQ ID NO: 362)] [PD-1 1.5 PD-12 3001 (SEQ ID NO: 981)]

(SEQ ID NO: 277)

[QGQSGQG][NWLDCQFYSECSVYGGGGSSGGAVGLLAPPGGLSGRSDNH
GGSDIQLTQSPSSLSASVGDRVTITCRASESVDAYGISFMNWFQQKPGKA
PKLLIYAASNQGSGVPSRFSGSGSGTDFTLTISSMQPEDFATYYCQQSKD
VPWTFGQGTKLEIK]

PD-1 1.5 PD-12 3001 amino acid sequence:

(SEQ ID NO: 1069)

NWLDCQFYSECSVYGGGGSSGGAVGLLAPPGGLSGRSDNHGGSDIQLTQS
PSSLSASVGDRVTITCRASESVDAYGISFMNWFQQKPGKAPKLLIYAASN
QGSGVPSRFSGSGSGTDFTLTISSMQPEDFATYYCQQSKDVPWTFGQGTK
LEIK]

[spacer (SEQ ID NO: 918)] [PD-1 1.5 PD-12 3001 (SEQ ID NO: 982)]

(SEQ ID NO: 278)

[CAAGGCCAGTCTGGCCAAGGT][AATTGGTTGGATTGCCAGTTTTATTC
TGAGTGCTCTGTTTATGGTGGAGGTGGCTCGAGCGGCGGCTCTATCTCTT
CCGGACTGCTGTCCGGCAGATCCGACAATCACGGCGGAGGATCCGGAGGT
GGCTCGAGCGGCGGCGCTGTGGGACTGCTGGCTCCTCCTGGTGGCCTGTC
TGGCAGATCTGATAACCACGGAGGATCCGATATCCAGCTGACCCAGAGCC
CTAGCAGCCTGTCTGCCAGCGTGGGCGACAGAGTGACCATCACCTGTAGA
GCCAGCGAGAGCGTGGACGCTTACGGCATCAGCTTCATGAACTGGTTCCA
GCAGAAGCCCGGCAAGGCCCCCAAGCTGCTGATCTACGCCGCCAGCAATC
AGGGCAGCGGCGTGCCAAGCAGATTTTCCGGCTCTGGCAGCGGCACCGAC
TTCACCCTGACCATCAGCAGCATGCAGCCCGAGGACTTCGCCACCTACTA
CTGCCAGCAGAGCAAGGACGTGCCCTGGACCTTTGGCCAGGGTACCAAGC
TGGAAATCAAG]

[spacer (SEQ ID NO: 362)] [PD-1 1.5 PD-16 3001 (SEQ ID NO: 983)]

(SEQ ID NO: 279)

[QGQSGQG][VLCAAYALSSGICGGGGGSSGGAVGLLAPPGGLSGRSDNH
GGSDIQLTQSPSSLSASVGDRVTITCRASESVDAYGISFMNWFQQKPGKA
PKLLIYAASNQGSGVPSRFSGSGSGTDFTLTISSMQPEDFATYYCQQSKD
VPWTFGQGTKLEIK]

PD-1 1.5 PD-16 3001 amino acid sequence:

(SEQ ID NO: 1070)

VLCAAYALSSGICGGGGGSSGGAVGLLAPPGGLSGRSDNHGGSDIQLTQS
PSSLSASVGDRVTITCRASESVDAYGISFMNWFQQKPGKAPKLLIYAASN
QGSGVPSRFSGSGSGTDFTLTISSMQPEDFATYYCQQSKDVPWTFGQGTK
LEIK

[spacer (SEQ ID NO: 918)] [PD-1 1.5 PD-16 3001 (SEQ ID NO: 984)]

(SEQ ID NO: 280)

[CAAGGCCAGTCTGGCCAAGGT][GTTTTGTGCGCTGCTTATGCTTTGAG
TTCGGGTATTTGCGGTGGGGGAGGTGGCTCGAGCGGCGGCTCTATCTCTT
CCGGACTGCTGTCCGGCAGATCCGACAATCACGGCGGAGGATCCGGAGGT
GGCTCGAGCGGCGGCGCTGTGGGACTGCTGGCTCCTCCTGGTGGCCTGTC
TGGCAGATCTGATAACCACGGAGGATCCGATATCCAGCTGACCCAGAGCC
CTAGCAGCCTGTCTGCCAGCGTGGGCGACAGAGTGACCATCACCTGTAGA
GCCAGCGAGAGCGTGGACGCTTACGGCATCAGCTTCATGAACTGGTTCCA
GCAGAAGCCCGGCAAGGCCCCCAAGCTGCTGATCTACGCCGCCAGCAATC
AGGGCAGCGGCGTGCCAAGCAGATTTTCCGGCTCTGGCAGCGGCACCGAC
TTCACCCTGACCATCAGCAGCATGCAGCCCGAGGACTTCGCCACCTACTA
CTGCCAGCAGAGCAAGGACGTGCCCTGGACCTTTGGCCAGGGTACCAAGC
TGGAAATCAAG]

[spacer (SEQ ID NO: 362)] [PD-1 1.5 PD025 2001 (SEQ ID NO: 985)]

(SEQ ID NO: 281)

[QGQSGQG][SRCSVYEVSSGLCDWGGGSSGGSISSGLLSGRSDNHGGGS
DIQLTQSPSSLSASVGDRVTITCRASESVDAYGISFMNWFQQKPGKAPKL
LIYAASNQGSGVPSRFSGSGSGTDFTLTISSMQPEDFATYYCQQSKDVPW
TFGQGTKLEIK]

PD-1 1.5 PD025 2001 amino acid sequence:

(SEQ ID NO: 1071)

SRCSVYEVSSGLCDWGGGSSGGSISSGLLSGRSDNHGGGSDIQLTQSPSS
LSASVGDRVTITCRASESVDAYGISFMNWFQQKPGKAPKLLIYAASNQGS
GVPSRFSGSGSGTDFTLTISSMQPEDFATYYCQQSKDVPWTFGQGTKLEI
K

[spacer (SEQ ID NO: 918)] [PD-1 1.5 PD025 2001 (SEQ ID NO: 986)]

(SEQ ID NO: 282)

[CAAGGCCAGTCTGGCCAAGGT][TCTCGTTGCTCTGTGTATGAGGTTTC
GTCGGGGCTGTGCGATTGGGGAGGTGGCTCGAGCGGCGGCTCTATCTCTT
CCGGACTGCTGTCCGGCAGATCCGACAATCACGGCGGAGGATCCGATATC
CAGCTGACCCAGAGCCCTAGCAGCCTGTCTGCCAGCGTGGGCGACAGAGT
GACCATCACCTGTAGAGCCAGCGAGAGCGTGGACGCTTACGGCATCAGCT
TCATGAACTGGTTCCAGCAGAAGCCCGGCAAGGCCCCCAAGCTGCTGATC
TACGCCGCCAGCAATCAGGGCAGCGGCGTGCCAAGCAGATTTTCCGGCTC
TGGCAGCGGCACCGACTTCACCCTGACCATCAGCAGCATGCAGCCCGAGG
ACTTCGCCACCTACTACTGCCAGCAGAGCAAGGACGTGCCCTGGACCTTT
GGCCAGGGTACCAAGCTGGAAATCAAG]

[spacer (SEQ ID NO: 362)] [PD-1 1.5 PD026 2001 (SEQ ID NO: 987)]

(SEQ ID NO: 283)

[QGQSGQG][GMCSAYAYSSKLCTIGGGSSGGSISSGLLSGRSDNHGGGS
DIQLTQSPSSLSASVGDRVTITCRASESVDAYGISFMNWFQQKPGKAPKL
LIYAASNQGSGVPSRFSGSGSGTDFTLTISSMQPEDFATYYCQQSKDVPW
TFGQGTKLEIK]

PD-1 1.5 PD026 2001 amino acid sequence:

(SEQ ID NO: 1072)

GMCSAYAYSSKLCTIGGGSSGGSISSGLLSGRSDNHGGGSDIQLTQSPSS
LSASVGDRVTITCRASESVDAYGISFMNWFQQKPGKAPKLLIYAASNQGS
GVPSRFSGSGSGTDFTLTISSMQPEDFATYYCQQSKDVPWTFGQGTKLEI

[spacer (SEQ ID NO: 918)] [PD-1 1.5 PD026 2001 (SEQ ID NO: 988)]

(SEQ ID NO: 284)

[CAAGGCCAGTCTGGCCAAGGT][GGGATGTGCTCGGCGTATGCTTATTC
GAGTAAGTTGTGCACTATTGGAGGTGGCTCGAGCGGCGGCTCTATCTCTT
CCGGACTGCTGTCCGGCAGATCCGACAATCACGGCGGAGGATCCGATATC
CAGCTGACCCAGAGCCCTAGCAGCCTGTCTGCCAGCGTGGGCGACAGAGT
GACCATCACCTGTAGAGCCAGCGAGAGCGTGGACGCTTACGGCATCAGCT
TCATGAACTGGTTCCAGCAGAAGCCCGGCAAGGCCCCCAAGCTGCTGATC
TACGCCGCCAGCAATCAGGGCAGCGGCGTGCCAAGCAGATTTTCCGGCTC
TGGCAGCGGCACCGACTTCACCCTGACCATCAGCAGCATGCAGCCCGAGG
ACTTCGCCACCTACTACTGCCAGCAGAGCAAGGACGTGCCCTGGACCTTT
GGCCAGGGTACCAAGCTGGAAATCAAG]

[spacer (SEQ ID NO: 362)] [PD-1 1.5 PD027 2001 (SEQ ID NO: 989)]

(SEQ ID NO: 285)

[QGQSGQG][MTTNTCNLLCQQFLTGGGSSGGSISSGLLSGRSDNHGGGS
DIQLTQSPSSLSASVGDRVTITCRASESVDAYGISFMNWFQQKPGKAPKL
LIYAASNQGSGVPSRFSGSGSGTDFTLTISSMQPEDFATYYCQQSKDVPW
TFGQGTKLEIK]

PD-1 1.5 PD027 2001 amino acid sequence:

(SEQ ID NO: 1073)

MTTNTCNLLCQQFLTGGGSSGGSISSGLLSGRSDNHGGGSDIQLTQSPSS
LSASVGDRVTITCRASESVDAYGISFMNWFQQKPGKAPKLLIYAASNQGS
GVPSRFSGSGSGTDFTLTISSMQPEDFATYYCQQSKDVPWTFGQGTKLEI
K]

[spacer (SEQ ID NO: 918)] [PD-1 1.5 PD027 2001 (SEQ ID NO: 990)]

(SEQ ID NO: 286)

[CAAGGCCAGTCTGGCCAAGGT][ATGACTACGAATACTTGCAATCTGTT
GTGCCAGCAGTTTTTGACGGGAGGTGGCTCGAGCGGCGGCTCTATCTCTT
CCGGACTGCTGTCCGGCAGATCCGACAATCACGGCGGAGGATCCGATATC
CAGCTGACCCAGAGCCCTAGCAGCCTGTCTGCCAGCGTGGGCGACAGAGT
GACCATCACCTGTAGAGCCAGCGAGAGCGTGGACGCTTACGGCATCAGCT
TCATGAACTGGTTCCAGCAGAAGCCCGGCAAGGCCCCCAAGCTGCTGATC
TACGCCGCCAGCAATCAGGGCAGCGGCGTGCCAAGCAGATTTTCCGGCTC
TGGCAGCGGCACCGACTTCACCCTGACCATCAGCAGCATGCAGCCCGAGG
ACTTCGCCACCTACTACTGCCAGCAGAGCAAGGACGTGCCCTGGACCTTT
GGCCAGGGTACCAAGCTGGAAATCAAG]

[spacer (SEQ ID NO: 362)] [PD-1 1.5 PD028 2001 (SEQ ID NO: 991)]

(SEQ ID NO: 287)

[QGQSGQG][FQPCLMFASSCFTSKGGGSSGGSISSGLLSGRSDNHGGGS
DIQLTQSPSSLSASVGDRVTITCRASESVDAYGISFMNWFQQKPGKAPKL
LIYAASNQGSGVPSRFSGSGSGTDFTLTISSMQPEDFATYYCQQSKDVPW
TFGQGTKLEIK]

PD-1 1.5 PD028 2001 amino acid sequence:

(SEQ ID NO: 991)

FQPCLMFASSCFTSKGGGSSGGSISSGLLSGRSDNHGGGSDIQLTQSPSS
LSASVGDRVTITCRASESVDAYGISFMNWFQQKPGKAPKLLIYAASNQGS
GVPSRFSGSGSGTDFTLTISSMQPEDFATYYCQQSKDVPWTFGQGTKLEI
K

[spacer (SEQ ID NO: 918)] [PD-1 1.5 PD028 2001 (SEQ ID NO: 992)]

(SEQ ID NO: 288)

[CAAGGCCAGTCTGGCCAAGGT][TTTCAGCCGTGCCTGATGTTTGCGAG
TAGTTGCTTTACTAGTAAGGGAGGTGGCTCGAGCGGCGGCTCTATCTCTT
CCGGACTGCTGTCCGGCAGATCCGACAATCACGGCGGAGGATCCGATATC
CAGCTGACCCAGAGCCCTAGCAGCCTGTCTGCCAGCGTGGGCGACAGAGT
GACCATCACCTGTAGAGCCAGCGAGAGCGTGGACGCTTACGGCATCAGCT
TCATGAACTGGTTCCAGCAGAAGCCCGGCAAGGCCCCCAAGCTGCTGATC
TACGCCGCCAGCAATCAGGGCAGCGGCGTGCCAAGCAGATTTTCCGGCTC
TGGCAGCGGCACCGACTTCACCCTGACCATCAGCAGCATGCAGCCCGAGG
ACTTCGCCACCTACTACTGCCAGCAGAGCAAGGACGTGCCCTGGACCTTT
GGCCAGGGTACCAAGCTGGAAATCAAG]

PD-1 1.5 PD028 2001 nucleic acid sequence:

(SEQ ID NO: 992)

TTTCAGCCGTGCCTGATGTTTGCGAGTAGTTGCTTTACTAGTAAGGGAGG
TGGCTCGAGCGGCGGCTCTATCTCTTCCGGACTGCTGTCCGGCAGATCCG
ACAATCACGGCGGAGGATCCGATATCCAGCTGACCCAGAGCCCTAGCAGC
CTGTCTGCCAGCGTGGGCGACAGAGTGACCATCACCTGTAGAGCCAGCGA
GAGCGTGGACGCTTACGGCATCAGCTTCATGAACTGGTTCCAGCAGAAGC
CCGGCAAGGCCCCCAAGCTGCTGATCTACGCCGCCAGCAATCAGGGCAGC
GGCGTGCCAAGCAGATTTTCCGGCTCTGGCAGCGGCACCGACTTCACCCT
GACCATCAGCAGCATGCAGCCCGAGGACTTCGCCACCTACTACTGCCAGC
AGAGCAAGGACGTGCCCTGGACCTTTGGCCAGGGTACCAAGCTGGAAATC
AAG

[spacer (SEQ ID NO: 362)] [PD-1 1.5 PD030 2001 (SEQ ID NO: 993)]

(SEQ ID NO: 289)

[QGQSGQG][ALCSMYLASSGLCNKGGGSSGGSISSGLLSGRSDNHGGGS
DIQLTQSPSSLSASVGDRVTITCRASESVDAYGISFMNWFQQKPGKAPKL
LIYAASNQGSGVPSRFSGSGSGTDFTLTISSMQPEDFATYYCQQSKDVPW
TFGQGTKLEIK]

PD-1 1.5 PD030 2001 amino acid sequence:

(SEQ ID NO: 1074)

ALCSMYLASSGLCNKGGGSSGGSISSGLLSGRSDNHGGGSDIQLTQSPSS
LSASVGDRVTITCRASESVDAYGISFMNWFQQKPGKAPKLLIYAASNQGS
GVPSRFSGSGSGTDFTLTISSMQPEDFATYYCQQSKDVPWTFGQGTKLEI
K

[spacer (SEQ ID NO: 918)] [PD-1 1.5 PD030 2001 (SEQ ID NO: 994)]

(SEQ ID NO: 290)

[CAAGGCCAGTCTGGCCAAGGT][GCGCTTTGCAGTATGTATCTTGCTAG
TTCTGGGCTGTGCAATAAGGGAGGTGGCTCGAGCGGCGGCTCTATCTCTT
CCGGACTGCTGTCCGGCAGATCCGACAATCACGGCGGAGGATCCGATATC
CAGCTGACCCAGAGCCCTAGCAGCCTGTCTGCCAGCGTGGGCGACAGAGT
GACCATCACCTGTAGAGCCAGCGAGAGCGTGGACGCTTACGGCATCAGCT
TCATGAACTGGTTCCAGCAGAAGCCCGGCAAGGCCCCCAAGCTGCTGATC
TACGCCGCCAGCAATCAGGGCAGCGGCGTGCCAAGCAGATTTTCCGGCTC
TGGCAGCGGCACCGACTTCACCCTGACCATCAGCAGCATGCAGCCCGAGG
ACTTCGCCACCTACTACTGCCAGCAGAGCAAGGACGTGCCCTGGACCTTT
GGCCAGGGTACCAAGCTGGAAATCAAG]

[spacer (SEQ ID NO: 362)] [PD-1 1.5 PD033 2001 (SEQ ID NO: 995)]

(SEQ ID NO: 291)

[QGQSGQG][EFCARDWLPYQCSSFGGGSSGGSISSGLLSGRSDNHGGGS
DIQLTQSPSSLSASVGDRVTITCRASESVDAYGISFMNWFQQKPGKAPKL
LIYAASNQGSGVPSRFSGSGSGTDFTLTISSMQPEDFATYYCQQSKDVPW
TFGQGTKLEIK]

PD-1 1.5 PD033 2001 amino acid sequence:

(SEQ ID NO: 1075)

EFCARDWLPYQCSSFGGGSSGGSISSGLLSGRSDNHGGGSDIQLTQSPSS
LSASVGDRVTITCRASESVDAYGISFMNWFQQKPGKAPKLLIYAASNQGS
GVPSRFSGSGSGTDFTLTISSMQPEDFATYYCQQSKDVPWTFGQGTKLEI
K]

[spacer (SEQ ID NO: 918)] [PD-1 1.5 PD033 2001 (SEQ ID NO: 996)]

(SEQ ID NO: 292)

[CAAGGCCAGTCTGGCCAAGGT][GAGTTTTGCGCTCGGGATTGGCTGCC
GTATCAGTGCTCGAGTTTTGGAGGTGGCTCGAGCGGCGGCTCTATCTCTT
CCGGACTGCTGTCCGGCAGATCCGACAATCACGGCGGAGGATCCGATATC
CAGCTGACCCAGAGCCCTAGCAGCCTGTCTGCCAGCGTGGGCGACAGAGT
GACCATCACCTGTAGAGCCAGCGAGAGCGTGGACGCTTACGGCATCAGCT
TCATGAACTGGTTCCAGCAGAAGCCCGGCAAGGCCCCCAAGCTGCTGATC
TACGCCGCCAGCAATCAGGGCAGCGGCGTGCCAAGCAGATTTTCCGGCTC
TGGCAGCGGCACCGACTTCACCCTGACCATCAGCAGCATGCAGCCCGAGG
ACTTCGCCACCTACTACTGCCAGCAGAGCAAGGACGTGCCCTGGACCTTT
GGCCAGGGTACCAAGCTGGAAATCAAG]

[spacer (SEQ ID NO: 362)] [PD-1 1.5 PD034 2001 (SEQ ID NO: 1028)]

(SEQ ID NO: 1029)

[QGQSGQG][TSYCSIEHYPCNTHHGGGSSGGSISSGLLSGRSDNHG
GGSDIQLTQSPSSLSASVGDRVTITCRASESVDAYGISFMNWFQQ
KPGKAPKLLIYAASNQGSGVPSRFSGSGSGTDFTLTISSMQPEDFATYY
CQQSKDVPWTFGQGTKLEIK]

PD-1 1.5 PD034 2001 amino acid sequence:

(SEQ ID NO: 1028)

TSYCSIEHYPCNTHHGGGSSGGSISSGLLSGRSDNHGGGSDIQLTQSPS
SLSASVGDRVTITCRASESVDAYGISFMNWFQQKPGKAPKLLIYAASNQ
GSGVPSRFSGSGSGTDFTLTISSMQPEDFATYYCQQSKDVPWTFGQGTK
LEIK

[spacer (SEQ ID NO: 918)] [PD-1 1.5 PD034 2001 (SEQ ID NO: 1030)

(SEQ ID NO: 1031)

[CAAGGCCAGTCTGGCCAAGGT][ACGTCATACTGCAGTATTGAGCAT
TACCCCTGCAATACACATCATGGAGGTGGCTCGAGCGGCGGCTCTATCTC
TTCCGGACTGCTGTCCGGCAGATCCGACAATCACGGCGGAGGATCCGATA
TCCAGCTGACCCAGAGCCCTAGCAGCCTGTCTGCCAGCGTGGGCGACAG
AGTGACCATCACCTGTAGAGCCAGCGAGAGCGTGGACGCTTACGGCATC
AGCTTCATGAACTGGTTCCAGCAGAAGCCCGGCAAGGCCCCCAAGCTGC
TGATCTACGCCGCCAGCAATCAGGGCAGCGGCGTGCCAAGCAGATTTTC
CGGCTCTGGCAGCGGCACCGACTTCACCCTGACCATCAGCAGCATGCAG
CCCGAGGACTTCGCCACCTACTACTGCCAGCAGAGCAAGGACGTGCCC
TGGACCTTTGGCCAGGGTACCAAGCTGGAAATCAAG]

PD-1 1.5 PD034 2001 nucleic acid sequence:

(SEQ ID NO: 1030)

ACGTCATACTGCAGTATTGAGCATTACCCCTGCAATACACATCATGGAG
GTGGCTCGAGCGGCGGCTCTATCTCTTCCGGACTGCTGTCCGGCAGATC
CGACAATCACGGCGGAGGATCCGATATCCAGCTGACCCAGAGCCCTAGC
AGCCTGTCTGCCAGCGTGGGCGACAGAGTGACCATCACCTGTAGAGCCA
GCGAGAGCGTGGACGCTTACGGCATCAGCTTCATGAACTGGTTCCAGCA
GAAGCCCGGCAAGGCCCCCAAGCTGCTGATCTACGCCGCCAGCAATCAG
GGCAGCGGCGTGCCAAGCAGATTTTCCGGCTCTGGCAGCGGCACCGACT
TCACCCTGACCATCAGCAGCATGCAGCCCGAGGACTTCGCCACCTACTA
CTGCCAGCAGAGCAAGGACGTGCCCTGGACCTTTGGCCAGGGTACCAAG
CTGGAAATCAAG

[spacer (SEQ ID NO: 362)] [PD-1 1.5 PD035 2001 (SEQ ID NO: 997)]

(SEQ ID NO: 293)

[QGQSGQG][PYICSSFPLDCQAGQGGGSSGGSISSGLLSGRSDNHGG
GSDIQLTQSPSSLSASVGDRVTITCRASESVDAYGISFMNWFQQKPGKAP
KLLIYAASNQGSGVPSRFSGSGSGTDFTLTISSMQPEDFATYYCQQSKDV
PWTFGQGTKLEIK]

PD-1 1.5 PD035 2001 amino acid sequence:

(SEQ ID NO: 1076)

PYICSSFPLDCQAGQGGGSSGGSISSGLLSGRSDNHGGGSDIQLTQSPS
SLSASVGDRVTITCRASESVDAYGISFMNWFQQKPGKAPKLLIYAASNQ
GSGVPSRFSGSGSGTDFTLTISSMQPEDFATYYCQQSKDVPWTFGQGTK
LEIK]

[spacer (SEQ ID NO: 918)] [PD-1 1.5 PD035 2001 (SEQ ID NO: 998)]

(SEQ ID NO: 584)

[CAAGGCCAGTCTGGCCAAGGT][CCTTATATTTGCTCTAGTTTTCCGTT
GGATTGCCAGGCGGGTCAGGGAGGTGGCTCGAGCGGCGGCTCTATCTCTT
CCGGACTGCTGTCCGGCAGATCCGACAATCACGGCGGAGGATCCGATATC
CAGCTGACCCAGAGCCCTAGCAGCCTGTCTGCCAGCGTGGGCGACAGAG
TGACCATCACCTGTAGAGCCAGCGAGAGCGTGGACGCTTACGGCATCAG
CTTCATGAACTGGTTCCAGCAGAAGCCCGGCAAGGCCCCCAAGCTGCTG
ATCTACGCCGCCAGCAATCAGGGCAGCGGCGTGCCAAGCAGATTTTCCG
GCTCTGGCAGCGGCACCGACTTCACCCTGACCATCAGCAGCATGCAGCC
CGAGGACTTCGCCACCTACTACTGCCAGCAGAGCAAGGACGTGCCCTGG
ACCTTTGGCCAGGGTACCAAGCTGGAAATCAAG]

### Example 9

### Anti-PD-1 Activatable Antibodies of the Disclosure

[0853] This example demonstrates that anti-PD-1 activatable antibodies of the disclosure can be made in a variety of combinations of MM, CM, VL, and VH domains, as well as in a variety of distinct Ig isotypes. In addition, this example demonstrates that anti-PD-1 activatable antibodies of the disclosure can be made in a variety of combinations of MM, CM, VLCDR1, VLCDR2, VLCDR3, VHCDR1, VHCDR2, and VHCDR3 domains, as well as in a variety of distinct Ig isotypes.

TABLE 13A

| | | VL | | VL CDRs | | | VH CDRs | | |
|---|---|---|---|---|---|---|---|---|---|
| | | SEQ | VH | SEQ ID NO: | | | SEQ ID NO: | | |
| Mask Sequence | Substrates: | ID NO: | SEQ ID NO: | CDR1 | CDR2 | CDR3 | CDR1 | CDR2 | CDR3 |
| AMSGCSWSAFCPYLA | LSGRSDNH | 1 | 3 | 653 | 658 | 664 | 669 | 678 | 683 |
| (SEQ ID NO: 66) | (SEQ ID NO: 294) | | | | | | | | |
| DVNCAIWYSVCITVP | TGRGPSWV | 5 | 7 | 654 | 659 | 665 | 670 | 679 | 684 |
| (SEQ ID NO: 67) | (SEQ ID NO: 295) | | | | | | | | |
| LVCPLYALSSGVCMG | PLTGRSGG | 9 | 11 | 655 | 660 | 666 | 671 | 680 | 685 |
| (SEQ ID NO: 68) | (SEQ ID NO: 296) | | | | | | | | |
| SVNCRIWSAVCAGYE | TARGPSFK | 13 | 15 | 656 | 661 | 667 | 672 | 681 | 686 |
| (SEQ ID NO: 69) | (SEQ ID NO: 297) | | | | | | | | |
| MLVCSLQPTAMCERV | NTLSGRSENHSG | 17 | 19 | 657 | 662 | 668 | 673 | 682 | 687 |
| (SEQ ID NO: 70) | (SEQ ID NO: 298) | | | | | | | | |
| APRCYMFASYCKSQY | NTLSGRSGNHGS | 21 | 39 | 663 | | | 674 | | |
| (SEQ ID NO: 71) | (SEQ ID NO: 299) | | | | | | | | |
| VGPCELTPKPVCNTY | TSTSGRSANPRG | 23 | 41 | | | | 675 | | |
| (SEQ ID NO: 72) | (SEQ ID NO: 300) | | | | | | | | |
| ETCNQYERSSGLCFA | TSGRSANP | 25 | 43 | | | | 676 | | |
| (SEQ ID NO: 73) | (SEQ ID NO: 301) | | | | | | | | |
| APRTCYTYQCSSFYT | VHMPLGFLGP | 27 | 45 | | | | 677 | | |
| (SEQ ID NO: 74) | (SEQ ID NO: 302) | | | | | | | | |

| | | | | | |
|---|---|---|---|---|---|
| GLCSWYLSSSGLCVD | AVGLLAPP | 29 | 47 | VL CDRs of SEQ ID | VH CDRs of SEQ ID |
| (SEQ ID NO: 75) | (SEQ ID NO: 303) | | | NO: 1 | NO: 3 |
| VPWCQLTPRVMCMWA | AQNLLGMV | 31 | 49 | VL CDRs of SEQ ID | VH CDRs of SEQ ID |
| (SEQ ID NO: 76) | (SEQ ID NO: 304) | | | NO: 5 | NO: 7 |
| NWLDCQFYSECSVYG | QNQALRMA | 33 | 51 | VL CDRs of SEQ ID | VH CDRs of SEQ ID |
| (SEQ ID NO: 77) | (SEQ ID NO: 305) | | | NO: 9 | NO: 11 |
| SCPLYVMSSFGGCWD | LAAPLGLL | 35 | 53 | VL CDRs of SEQ ID | VH CDRs of SEQ ID |
| (SEQ ID NO: 78) | (SEQ ID NO: 306) | | | NO: 13 | NO: 15 |
| MSHCWMFSSSCDGVK | STFPFGMF | 37 | 55 | VL CDRs of SEQ ID | VH CDRs of SEQ ID |
| (SEQ ID NO: 79) | (SEQ ID NO: 307) | | | NO: 17 | NO: 19 |
| VSYCTWLIEVICLRG | ISSGLLSS | | 57 | VL CDRs of SEQ ID | VH CDRs of SEQ ID |
| (SEQ ID NO: 80) | (SEQ ID NO: 308) | | | NO: 21 | NO: 39 |
| VLCAAYALSSGICGG | PAGLWLDP | | 59 | VL CDRs of SEQ ID | VH CDRs of SEQ ID |
| (SEQ ID NO: 81) | (SEQ ID NO: 309) | | | NO: 23 | NO: 41 |
| TTCNLYQQSSMFCNA | VAGRSMRP | | | VL CDRs of SEQ ID | VH CDRs of SEQ ID |
| (SEQ ID NO: 82) | (SEQ ID NO: 310) | | | NO: 25 | NO: 43 |
| APRCYMFASYCKSQY | VVPEGRRS | | | VL CDRs of SEQ ID | VH CDRs of SEQ ID |
| (SEQ ID NO: 83) | (SEQ ID NO: 311) | | | NO: 27 | NO: 45 |
| PCDQNPYFYPYVCHA | ILPRSPAF | | | VL CDRs of SEQ ID | VH CDRs of SEQ ID |
| (SEQ ID NO: 84) | (SEQ ID NO: 312) | | | NO: 29 | NO: 47 |
| SVCPMYALSSMLCGA | MVLGRSLL | | | VL CDRs of SEQ ID | VH CDRs of SEQ ID |
| (SEQ ID NO: 85) | (SEQ ID NO: 313) | | | NO: 31 | NO: 49 |
| LSVECYVFSRCSSLP | QGRAITFI | | | VL CDRs of SEQ ID | VH CDRs of SEQ ID |
| (SEQ ID NO: 86) | (SEQ ID NO: 314) | | | NO: 33 | NO: 51 |
| FYCTYLVSLTCHPQ | SPRSIMLA | | | VL CDRs of SEQ ID | VH CDRs of SEQ ID |
| (SEQ ID NO: 87) | (SEQ ID NO: 315) | | | NO: 35 | NO: 53 |
| SMAGCQWSSFCVQRD | SMLRSMPL | | | VL CDRs of SEQ ID | VH CDRs of SEQ ID |
| (SEQ ID NO: 88) | (SEQ ID NO: 316) | | | NO: 37 | NO: 55 |
| IYSCYMFASRCTSDK | SARGPSRW | | | | VH CDRs of SEQ ID |
| (SEQ ID NO: 89) | (SEQ ID NO: 319) | | | | NO: 57 |
| SRCSVYEVSSGLCDW | GWHTGRN | | | | VH CDRs of SEQ ID |
| (SEQ ID NO: 90) | (SEQ ID NO: 320) | | | | NO: 59 |
| GMCSAYAYSSKLCTI | HTGRSGAL | | | LC CDRs of SEQ ID | HC CDRs of SEQ ID |
| (SEQ ID NO: 91) | (SEQ ID NO: 321) | | | NO: 543 | NO: 546 |
| MTTNTCNLLCQQFLT | AARGPAIH | | | | |
| (SEQ ID NO: 92) | (SEQ ID NO: 322) | | | | |
| FQPCLMFASSCFTSK | RGPAFNPM | | | | |
| (SEQ ID NO: 93) | (SEQ ID NO: 323) | | | | |
| WNCHPAGVGPVFCEV | SSRGPAYL | | | | |
| (SEQ ID NO: 94) | (SEQ ID NO: 324) | | | | |
| ALCSMYLASSGLCNK | RGPATPIM | | | | |
| (SEQ ID NO: 95) | (SEQ ID NO: 325) | | | | |
| NYLSCQFFQNCYETY | RGPA | | | | |
| (SEQ ID NO: 96) | (SEQ ID NO: 326) | | | | |
| GWCLFSDMWLGLCSA | GGQPSGMWGW | | | | |
| (SEQ ID NO: 97) | (SEQ ID NO: 327) | | | | |
| EFCARDWLPYQCSSF | FPRPLGITGL | | | | |
| (SEQ ID NO: 98) | (SEQ ID NO: 328) | | | | |
| TSYCSIEHYPCNTHH | SPLTGRSG | | | | |
| (SEQ ID NO: 99) | (SEQ ID NO: 329) | | | | |
| PYICSSFPLDCQAGQ | SAGFSLPA | | | | |
| (SEQ ID NO: 100) | (SEQ ID NO: 330) | | | | |
| VGCEWYMSSSGMCSR | LAPLGLQRR | | | | |
| (SEQ ID NO: 101) | (SEQ ID NO: 331) | | | | |
| EVCGGCSMQSVSCWP | SGGPLGVR | | | | |
| (SEQ ID NO: 102) | (SEQ ID NO: 332) | | | | |
| FTECQLSPKAICMSN | PLGL | | | | |
| (SEQ ID NO: 103) | (SEQ ID NO: 333) | | | | |
| KYCLFSEYVEGTCLN | ISSGLSS | | | | |
| (SEQ ID NO: 104) | (SEQ ID NO: 334) | | | | |
| SGCPMYAWGWDECWR | PVGYTSSL | | | | |
| (SEQ ID NO: 105) | (SEQ ID NO: 335) | | | | |
| VDCPWYASSSAICSR | DWLYWPGI | | | | |
| (SEQ ID NO: 106) | (SEQ ID NO: 336) | | | | |
| DMLLCQIRGSCAAWG | LKAAPRWA | | | | |
| (SEQ ID NO: 107) | (SEQ ID NO: 337) | | | | |
| ECHPYQASASLWCGY | GPSHLVLT | | | | |
| (SEQ ID NO: 108) | (SEQ ID NO: 338) | | | | |
| MMMGCMWSAWCPPSR | LPGGLSPW | | | | |
| (SEQ ID NO: 109) | (SEQ ID NO: 339) | | | | |
| NAYFRCSLMCNMIMF | MGLFSEAG | | | | |
| (SEQ ID NO: 110) | (SEQ ID NO: 340) | | | | |
| ACCKESVHSVHDCKR | SPLPLRVP | | | | |
| (SEQ ID NO: 111) | (SEQ ID NO: 341) | | | | |
| ACIGINSYMSNYCYL | RMHLRSLG | | | | |
| (SEQ ID NO: 112) | (SEQ ID NO: 342) | | | | |
| ANCSFLELTNKFCTI | LLAPSHRA | | | | |
| (SEQ ID NO: 113) | (SEQ ID NO: 343) | | | | |
| AYCSYLMFASNPCII | GPRSFGL | | | | |
| (SEQ ID NO: 114) | (SEQ ID NO: 344) | | | | |
| CFTSKCPCLCYSLLA | GPRSFG | | | | |
| (SEQ ID NO: 115) | (SEQ ID NO: 345) | | | | |
| CLCRDINCWLGCSKT | LSGRSGNH | | | | |
| (SEQ ID NO: 116) | (SEQ ID NO: 1157) | | | | |
| CWCDIYCSPYQCSSF | SGRSANPRG | | | | |
| (SEQ ID NO: 117) | (SEQ ID NO: 1158) | | | | |
| DCIYYYQQSANLCSY | LSGRSDDH | | | | |
| (SEQ ID NO: 118) | (SEQ ID NO: 1161) | | | | |
| DCTGVNYYIDKHCIN | LSGRSDIH | | | | |
| (SEQ ID NO: 119) | (SEQ ID NO: 1162) | | | | |
| DECHGYLRSSGLCGG | LSGRSDQH | | | | |
| (SEQ ID NO: 120) | (SEQ ID NO: 1165) | | | | |
| DICSAYAASSGFCYY | LSGRSDTH | | | | |
| (SEQ ID NO: 121) | (SEQ ID NO: 1166) | | | | |
| DIICVLIPTAWCGRT | LSGRSDYH | | | | |
| (SEQ ID NO: 122) | (SEQ ID NO: 1169) | | | | |
| DNCCMYCSWWIACRD | LSGRSDNP | | | | |
| (SEQ ID NO: 123) | (SEQ ID NO: 1520) | | | | |
| DSCQWYMLSADLCGT | LSGRSANP | | | | |
| (SEQ ID NO: 124) | (SEQ ID NO: 1695) | | | | |
| DSVCFSSSSFLCHKS | LSGRSANI | | | | |
| (SEQ ID NO: 125) | (SEQ ID NO: 1696) | | | | |
| DTMCAIWWTVCSGGR | LSGRSDNI | | | | |
| (SEQ ID NO: 126) | (SEQ ID NO: 1697) | | | | |
| ECTYQTSSFHEACMS | MIAPVAYR | | | | |
| (SEQ ID NO: 127) | (SEQ ID NO: 1698) | | | | |
| EGCNLYERSSYGCNN | RPSPMWAY | | | | |
| (SEQ ID NO: 128) | (SEQ ID NO: 1699) | | | | |
| EGCTAFAMSAGICGG | WATPRPMR | | | | |
| (SEQ ID NO: 129) | (SEQ ID NO: 1700) | | | | |
| EQSCSLTPIAFCWSE | FRLLDWQW | | | | |
| (SEQ ID NO: 130) | (SEQ ID NO: 1701) | | | | |
| EWCNAYISSSKLCST | ISSGL | | | | |
| (SEQ ID NO: 131) | (SEQ ID NO: 1702) | | | | |
| FEVCYMFASACRNGM | ISSGLLS | | | | |
| (SEQ ID NO: 132) | (SEQ ID NO: 1703) | | | | |
| FSCSWYAESSSLCDI | ISSGLL | | | | |
| (SEQ ID NO: 133) | (SEQ ID NO: 1704) | | | | |
| FVCQMFEASSGLCGG | ISSGLLSGRSDNH | | | | |
| (SEQ ID NO: 134) | (SEQ ID NO: 214) | | | | |
| FYCPCCMFASSCGSR | AVGLLAPPGGLSGRSDNH | | | | |
| (SEQ ID NO: 135) | (SEQ ID NO: 318) | | | | |
| FYCSYLPGASHQCSH | ISSGLLSSGGSGGSLSGRSDNH | | | | |
| (SEQ ID NO: 136) | (SEQ ID NO: 346) | | | | |
| FYCSYLYMCEVCCYE | ISSGLLSSGGSGGSLSGRSDNH | | | | |
| (SEQ ID NO: 137) | (SEQ ID NO: 346) | | | | |
| GFCTQHTVLTWCPTS | AVGLLAPPGGTSTSGRSANPRG | | | | |
| (SEQ ID NO: 138) | (SEQ ID NO: 347) | | | | |
| GSCPSYAVSAGLCYA | TSTSGRSANPRGGGAVGLLAPP | | | | |
| (SEQ ID NO: 139) | (SEQ ID NO: 348) | | | | |
| GSQCFLTPTAFCTHT | VHMPLGFLGPGGTSTSGRSANPRG | | | | |
| (SEQ ID NO: 140) | (SEQ ID NO: 349) | | | | |
| GTCHPYMQSSKICNN | TSTSGRSANPRGGGVHMPLGFLGP | | | | |
| (SEQ ID NO: 141) | (SEQ ID NO: 350) | | | | |
| GVECFVFTGGCGGYG | LSGRSDNHGGAVGLLAPP | | | | |
| (SEQ ID NO: 142) | (SEQ ID NO: 351) | | | | |
| HELCNGHWVPCCWAY | VHMPLGFLGPGGLSGRSDNH | | | | |
| (SEQ ID NO: 143) | (SEQ ID NO: 352) | | | | |
| ICDSYYAVSSGLCLL | LSGRSDNHGGVHMPLGFLGP | | | | |
| (SEQ ID NO: 144) | (SEQ ID NO: 353) | | | | |
| IGCAWYVSSAGWCSP | LSGRSDNHGGSGGSISSGLLSS | | | | |
| (SEQ ID NO: 145) | (SEQ ID NO: 354) | | | | |
| INLCWMFASECGEHH | LSGRSGNHGGSGGSISSGLLSS | | | | |
| (SEQ ID NO: 146) | (SEQ ID NO: 355) | | | | |
| KCWLAEMTNLEHCNM | ISSGLLSSGGSGGSLSGRSGNH | | | | |
| (SEQ ID NO: 147) | (SEQ ID NO: 356) | | | | |
| KHCSDFAYSSRLCDR | LSGRSDNHGGSGGSQNQALRMA | | | | |
| (SEQ ID NO: 148) | (SEQ ID NO: 357) | | | | |
| KVCSSYASSSGLCGW | QNQALRMAGGSGGSLSGRSDNH | | | | |
| (SEQ ID NO: 149) | (SEQ ID NO: 358) | | | | |
| LDS CYMFASYCVQAV | LSGRSGNHGGSGGSQNQALRMA | | | | |
| (SEQ ID NO: 150) | (SEQ ID NO: 359) | | | | |
| LLACHPIFVTVCQTR | QNQALRMAGGSGGSLSGRSGNH | | | | |
| (SEQ ID NO: 151) | (SEQ ID NO: 360) | | | | |
| LLSCPYNPEHVCHTS | ISSGLLSGRSGNH | | | | |
| (SEQ ID NO: 152) | (SEQ ID NO: 361) | | | | |
| LMCSLYALSSNLCGR | ISSGLLSSGGSGGSLSGRNH | | | | |
| (SEQ ID NO: 153) | (SEQ ID NO: 1091) | | | | |
| LMWCVLFLWSWCCRI | ISSGLLSGRSANPRG | | | | |
| (SEQ ID NO: 154) | (SEQ ID NO: 1092) | | | | |
| LPI CHLTPTAVCTHI | AVGLLAPPTSGRSANPRG | | | | |
| (SEQ ID NO: 155) | (SEQ ID NO: 1093) | | | | |
| LSNMCLAFGSCLYAW | AVGLLAPPSGRSANPRG | | | | |
| (SEQ ID NO: 156) | (SEQ ID NO: 1094) | | | | |
| LSRCHPIWYTICQNP | ISSGLLSGRSDDH | | | | |
| (SEQ ID NO: 157) | (SEQ ID NO: 1095) | | | | |
| LTQCMSVHKECGGYE | ISSGLLSGRSDIH | | | | |
| (SEQ ID NO: 158) | (SEQ ID NO: 1096) | | | | |
| LVNCRIWSWVCEEAT | ISSGLLSGRSDQH | | | | |
| (SEQ ID NO: 159) | (SEQ ID NO: 1097) | | | | |
| LYCSWYQMSSAVCKE | ISSGLLSGRSDTH | | | | |
| (SEQ ID NO: 160) | (SEQ ID NO: 1098) | | | | |
| MECGWYALSARFCEV | ISSGLLSGRSDYH | | | | |
| (SEQ ID NO: 161) | (SEQ ID NO: 1099) | | | | |
| MTCSPYAMSAHFCNE | ISSGLLSGRSDNP | | | | |
| (SEQ ID NO: 162) | (SEQ ID NO: 1100) | | | | |
| MVCSLYAYSASLCGA | ISSGLLSGRSANP | | | | |
| (SEQ ID NO: 163) | (SEQ ID NO: 1101) | | | | |
| NALCWSTFSWWCDMD | ISSGLLSGRSANI | | | | |
| (SEQ ID NO: 164) | (SEQ ID NO: 1102) | | | | |
| NFTCMLTPKAYCVQT | AVGLLAPPGGLSGRSDDH | | | | |
| (SEQ ID NO: 165) | (SEQ ID NO: 1103) | | | | |
| NGACIFILSWCINKT | AVGLLAPPGGLSGRSDIH | | | | |
| (SEQ ID NO: 166) | (SEQ ID NO: 1104) | | | | |
| NGCELYAAASGLCRT | AVGLLAPPGGLSGRSDQH | | | | |
| (SEQ ID NO: 167) | (SEQ ID NO: 1105) | | | | |
| NIECSVFGRCCCDNY | AVGLLAPPGGLSGRSDTH | | | | |
| (SEQ ID NO: 168) | (SEQ ID NO: 1106) | | | | |
| PACRPMFWNRSCDNI | AVGLLAPPGGLSGRSDYH | | | | |
| (SEQ ID NO: 169) | (SEQ ID NO: 1107) | | | | |
| PCRVSNMFFPYNCLD | AVGLLAPPGGLSGRSDNP | | | | |
| (SEQ ID NO: 170) | (SEQ ID NO: 1108) | | | | |
| PIMCMLLPESYCWIW | AVGLLAPPGGLSGRSANP | | | | |
| (SEQ ID NO: 171) | (SEQ ID NO: 1109) | | | | |
| PQSCYMFASLCMPNG | AVGLLAPPGGLSGRSANI | | | | |
| (SEQ ID NO: 172) | (SEQ ID NO: 1110) | | | | |
| PRCPQGLPLYQCSSF | ISSGLLSGRSDNI | | | | |
| (SEQ ID NO: 173) | (SEQ ID NO: 1111) | | | | |
| PSVECLVFKRCYALP | AVGLLAPPGGLSGRSDNI | | | | |
| (SEQ ID NO: 174) | (SEQ ID NO: 1112) | | | | |
| PVCQRSATIYNCNWF | | | | | |
| (SEQ ID NO: 175) | | | | | |
| QCAAYYISSFGGCSN | | | | | |
| (SEQ ID NO: 176) | | | | | |
| QFGCFMLARDFCGTY | | | | | |
| (SEQ ID NO: 177) | | | | | |
| QMMCPYNPEHKCHQK | | | | | |
| (SEQ ID NO: 178) | | | | | |
| QRECWMFASSCNSKN | | | | | |
| (SEQ ID NO: 179) | | | | | |
| QSNMCITYICSSFNY | | | | | |
| (SEQ ID NO: 180) | | | | | |
| QSRCHSLAPYLCSSF | | | | | |
| (SEQ ID NO: 181) | | | | | |
| RAYCSLLFADSCNNN | | | | | |
| (SEQ ID NO: 182) | | | | | |
| RCIGINQYIDSNCYN | | | | | |
| (SEQ ID NO: 183) | | | | | |
| RLSCFMFASQCALEF | | | | | |
| (SEQ ID NO: 184) | | | | | |
| RQCIILMNHRQCFFK | | | | | |
| (SEQ ID NO: 185) | | | | | |
| RSCTPYMMSSSLCNT | | | | | |
| (SEQ ID NO: 186) | | | | | |
| RYCHYWKMPYECSSF | | | | | |
| (SEQ ID NO: 187) | | | | | |
| SCVSLSWFDMLKCYE | | | | | |
| (SEQ ID NO: 188) | | | | | |
| SDNCEIWWTVCSAAM | | | | | |
| (SEQ ID NO: 189) | | | | | |
| SFCWSYLVSSGLCGV | | | | | |
| (SEQ ID NO: 190) | | | | | |
| SMCMNNYGTTIMCGN | | | | | |
| (SEQ ID NO: 191) | | | | | |
| SMVGCGWSTFCPSRG | | | | | |
| (SEQ ID NO: 192) | | | | | |
| SSLHCANGHTCPFCL | | | | | |
| (SEQ ID NO: 193) | | | | | |
| SVCSYYEESSGICSP | | | | | |
| (SEQ ID NO: 194) | | | | | |
| SWCGWYAASSGVCAL | | | | | |
| (SEQ ID NO: 195) | | | | | |
| TCISQTIDSYLNCVN | | | | | |
| (SEQ ID NO: 196) | | | | | |
| TFCNLYTKSSNICMS | | | | | |
| (SEQ ID NO: 197) | | | | | |
| TYCVFHEYLDNTCNN | | | | | |
| (SEQ ID NO: 198) | | | | | |
| VATGCPNLMLCGSWP | | | | | |
| (SEQ ID NO: 199) | | | | | |
| VEYCSLLLGNRCDYW | | | | | |
| (SEQ ID NO: 200) | | | | | |
| VGCNMYLMSAGLCVD | | | | | |
| (SEQ ID NO: 201) | | | | | |
| VLYCSWDSGTCVGSH | | | | | |
| (SEQ ID NO: 202) | | | | | |
| VMFSCYYLETCAPGV | | | | | |
| (SEQ ID NO: 203) | | | | | |
| VRIGLCPESCLVSGF | | | | | |
| (SEQ ID NO: 204) | | | | | |
| VTCTYYATSSSLCNT | | | | | |
| (SEQ ID NO: 205) | | | | | |
| VTGCILLPKAWCWGD | | | | | |
| (SEQ ID NO: 206) | | | | | |
| VWCSIYEYSSNLCSR | | | | | |
| (SEQ ID NO: 207) | | | | | |
| WMLECQYNNTCNNMT | | | | | |
| (SEQ ID NO: 208) | | | | | |
| WPCSPLEYYNNICNV | | | | | |
| (SEQ ID NO: 209) | | | | | |
| WTYDCHLNQTCPTYY | | | | | |
| (SEQ ID NO: 210) | | | | | |
| YCSINMYLIGGNCMY | | | | | |
| (SEQ ID NO: 211) | | | | | |
| YFCSLYANSAGFCGG | | | | | |
| (SEQ ID NO: 212) | | | | | |
| YVSCYMFSSSCPSTW | | | | | |
| (SEQ ID NO: 213) | | | | | |

TABLE 13B

| | | VL | VH | VL CDRs | | | VH CDRs | | |
|---|---|---|---|---|---|---|---|---|---|
| | | SEQ | SEQ | SEQ ID NO: | | | SEQ ID NO: | | |
| Mask Sequence | Substrates: | ID NO: | ID NO: | CDR1 | CDR2 | CDR3 | CDR1 | CDR2 | CDR3 |
| RYCHAANPDRFCGIY | LSGRSDNH | 626 | 1346 | VL CDRs of SEQ ID | | | VH CDRs of SEQ ID | | |
| (SEQ ID NO: 1206) | (SEQ ID NO: 294) | | | NO: 626 | | | NO: 1346 | | |
| PRVCSTDGGDYCLLP | TGRGPSWV | | | 1705 | 1706 | 1707 | 1708 | 1709 | 1710 |
| (SEQ ID NO: 1207) | (SEQ ID NO: 295) | | | | | | | | |
| PRPQCHHRHNCPDHP | PLTGRSGG | | | | | | | | |
| (SEQ ID NO: 1208) | (SEQ ID NO: 296) | | | | | | | | |
| KCSRPAHQNPDRCSR | TARGPSFK | | | | | | | | |
| (SEQ ID NO: 1209) | (SEQ ID NO: 297) | | | | | | | | |
| ASYRCPDYKCSHTKH | NTLSGRSENHSG | | | | | | | | |
| (SEQ ID NO: 1210) | (SEQ ID NO: 298) | | | | | | | | |
| LPRCPDHPIKCIETK | NTLSGRSGNHGS | | | | | | | | |
| (SEQ ID NO: 1211) | (SEQ ID NO: 299) | | | | | | | | |
| YTFGCPDRYCDRAAT | TSTSGRSANPRG | | | | | | | | |
| (SEQ ID NO: 1212) | (SEQ ID NO: 300) | | | | | | | | |
| RGCPDFNPPSHCYTA | TSGRSANP | | | | | | | | |
| (SEQ ID NO: 1213) | (SEQ ID NO: 301) | | | | | | | | |
| RDYCGPQSPDYCHEI | VHMPLGFLGP | | | | | | | | |
| (SEQ ID NO: 1214) | (SEQ ID NO: 302) | | | | | | | | |
| PNKPCPDLQCYVTNY | AVGLLAPP | | | | | | | | |
| (SEQ ID NO: 1215) | (SEQ ID NO: 303) | | | | | | | | |
| PRVACGEPDLCYSNT | AQNLLGMV | | | | | | | | |
| (SEQ ID NO: 1216) | (SEQ ID NO: 304) | | | | | | | | |
| RGCKKHTISTLTCPD | QNQALRMA | | | | | | | | |
| (SEQ ID NO: 1217) | (SEQ ID NO: 305) | | | | | | | | |
| PAYRCPDRPPCKNQM | LAAPLGLL | | | | | | | | |
| (SEQ ID NO: 1218) | (SEQ ID NO: 306) | | | | | | | | |
| NARCYPYFGDNCHMN | STFPFGMF | | | | | | | | |
| (SEQ ID NO: 1220) | (SEQ ID NO: 307) | | | | | | | | |
| PTLRCPDRWCYDSPR | ISSGLLSS | | | | | | | | |
| (SEQ ID NO: 1221) | (SEQ ID NO: 308) | | | | | | | | |
| PSNLCPDKWCQTWRS | PAGLWLDP | | | | | | | | |
| (SEQ ID NO: 1222) | (SEQ ID NO: 309) | | | | | | | | |
| TPRYCAASYCPAHGY | VAGRSMRP | | | | | | | | |
| (SEQ ID NO: 1223) | (SEQ ID NO: 310) | | | | | | | | |
| RPGCGAVSPRCPDAP | VVPEGRRS | | | | | | | | |
| (SEQ ID NO: 1224) | (SEQ ID NO: 311) | | | | | | | | |
| VLRCHKQNPDNCNNH | ILPRSPAF | | | | | | | | |
| (SEQ ID NO: 1225) | (SEQ ID NO: 312) | | | | | | | | |
| GVKSCREPDFCSRGS | MVLGRSLL | | | | | | | | |
| (SEQ ID NO: 1226) | (SEQ ID NO: 313) | | | | | | | | |
| RNNLCPDYSCNNHNS | QGRAITFI | | | | | | | | |
| (SEQ ID NO: 1227) | (SEQ ID NO: 314) | | | | | | | | |
| RAACHRLNPDACTNG | SPRSIMLA | | | | | | | | |
| (SEQ ID NO: 1228) | (SEQ ID NO: 315) | | | | | | | | |
| VCQSDRIPDYVICTD | SMLRSMPL | | | | | | | | |
| (SEQ ID NO: 1229) | (SEQ ID NO: 316) | | | | | | | | |
| RNCRIASINPDYCNI | SARGPSRW | | | | | | | | |
| (SEQ ID NO: 1230) | (SEQ ID NO: 319) | | | | | | | | |
| KEWRCPDYKCKPSYH | GWHTGRN | | | | | | | | |
| (SEQ ID NO: 1231) | (SEQ ID NO: 320) | | | | | | | | |
| NLRICHKSLCPDYIK | HTGRSGAL | | | | | | | | |
| (SEQ ID NO: 1232) | (SEQ ID NO: 321) | | | | | | | | |
| NTHKCSNTNICPSFN | AARGPAIH | | | | | | | | |
| (SEQ ID NO: 1233) | (SEQ ID NO: 322) | | | | | | | | |
| STRYCQASQCQMSPY | RGPAFNPM | | | | | | | | |
| (SEQ ID NO: 1234) | (SEQ ID NO: 323) | | | | | | | | |
| THRFCTASLCNKNTS | SSRGPAYL | | | | | | | | |
| (SEQ ID NO: 1235) | (SEQ ID NO: 324) | | | | | | | | |
| YTLCNTRSPDWCPNK | RGPATPIM | | | | | | | | |
| (SEQ ID NO: 1236) | (SEQ ID NO: 325) | | | | | | | | |
| IRCTTGQSPDYCPQS | RGPA | | | | | | | | |
| (SEQ ID NO: 1237) | (SEQ ID NO: 326) | | | | | | | | |
| RCNQPDKNDQMLCNI | GGQPSGMWGW | | | | | | | | |
| (SEQ ID NO: 1238) | (SEQ ID NO: 327) | | | | | | | | |
| GTCRTDHQSPDYCYY | FPRPLGITGL | | | | | | | | |
| (SEQ ID NO: 1239) | (SEQ ID NO: 328) | | | | | | | | |
| RGCFRSGDSLGMCPD | SPLTGRSG | | | | | | | | |
| (SEQ ID NO: 1240) | (SEQ ID NO: 329) | | | | | | | | |
| SGCFDSNEHRHCSRI | SAGFSLPA | | | | | | | | |
| (SEQ ID NO: 1241) | (SEQ ID NO: 330) | | | | | | | | |
| NRCMKLWYNPDCVAR | LAPLGLQRR | | | | | | | | |
| (SEQ ID NO: 1242) | (SEQ ID NO: 331) | | | | | | | | |
| PLCARPHYWSPCDQS | SGGPLGVR | | | | | | | | |
| (SEQ ID NO: 1243) | (SEQ ID NO: 332) | | | | | | | | |
| DSKCHPNSPDYCFNS | PLGL | | | | | | | | |
| (SEQ ID NO: 1244) | (SEQ ID NO: 333) | | | | | | | | |
| NGSCRPLGGDFCGNR | ISSGLSS | | | | | | | | |
| (SEQ ID NO: 1245) | (SEQ ID NO: 334) | | | | | | | | |
| KTRCIEMSGDYCAKS | PVGYTSSL | | | | | | | | |
| (SEQ ID NO: 1246) | (SEQ ID NO: 335) | | | | | | | | |
| IRPCMYNWGDLCNQF | DWLYWPGI | | | | | | | | |
| (SEQ ID NO: 1247) | (SEQ ID NO: 336) | | | | | | | | |
| VKTCMENNPDYCYNN | LKAAPRWA | | | | | | | | |
| (SEQ ID NO: 1248) | (SEQ ID NO: 337) | | | | | | | | |
| LRMCFEASGDYCDQQ | GPSHLVLT | | | | | | | | |
| (SEQ ID NO: 1249) | (SEQ ID NO: 338) | | | | | | | | |
| IRKCQLDGPDQCMLT | LPGGLSPW | | | | | | | | |
| (SEQ ID NO: 1250) | (SEQ ID NO: 339) | | | | | | | | |
| KWKCHKNNPNYCNNR | MGLFSEAG | | | | | | | | |
| (SEQ ID NO: 1251) | (SEQ ID NO: 340) | | | | | | | | |
| RTMCLDTNPDYCQSH | SPLPLRVP | | | | | | | | |
| (SEQ ID NO: 1252) | (SEQ ID NO: 341) | | | | | | | | |
| LAACHSMDSHRCPDY | RMHLRSLG | | | | | | | | |
| (SEQ ID NO: 1253) | (SEQ ID NO: 342) | | | | | | | | |
| RSPCIHNATMCPDYT | LLAPSHRA | | | | | | | | |
| (SEQ ID NO: 1254) | (SEQ ID NO: 343) | | | | | | | | |
| MPRCPDWPPRCSMVI | GPRSFGL | | | | | | | | |
| (SEQ ID NO: 1255) | (SEQ ID NO: 344) | | | | | | | | |
| VRQLCRLPDYCPSGK | GPRSFG | | | | | | | | |
| (SEQ ID NO: 1256) | (SEQ ID NO: 345) | | | | | | | | |
| PRPPCAQSLNCPDRA | LSGRSGNH | | | | | | | | |
| (SEQ ID NO: 1257) | (SEQ ID NO: 1157) | | | | | | | | |
| SFGRCTLVRTCPDFM | SGRSANPRG | | | | | | | | |
| (SEQ ID NO: 1258) | (SEQ ID NO: 1158) | | | | | | | | |
| RDKPCPDFSCATIHY | LSGRSDDH | | | | | | | | |
| (SEQ ID NO: 1259) | (SEQ ID NO: 1161) | | | | | | | | |
| ATKPCPDRWCTMSTL | LSGRSDIH | | | | | | | | |
| (SEQ ID NO: 1260) | (SEQ ID NO: 1162) | | | | | | | | |
| SSNRCPDLRCTHHNM | LSGRSDQH | | | | | | | | |
| (SEQ ID NO: 1261) | (SEQ ID NO: 1165) | | | | | | | | |
| RGSMCPDLHCSLSHI | LSGRSDTH | | | | | | | | |
| (SEQ ID NO: 1262) | (SEQ ID NO: 1166) | | | | | | | | |
| NYQRCPDRTCMHNII | LSGRSDYH | | | | | | | | |
| (SEQ ID NO: 1263) | (SEQ ID NO: 1169) | | | | | | | | |
| QKRPCPDRKCHAHYN | LSGRSDNP | | | | | | | | |
| (SEQ ID NO: 1264) | (SEQ ID NO: 1520) | | | | | | | | |
| QNHRCPDRWCNKTTN | LSGRSANP | | | | | | | | |
| (SEQ ID NO: 1265) | (SEQ ID NO: 1695) | | | | | | | | |
| RLNLCPDKHCHMTNL | LSGRSANI | | | | | | | | |
| (SEQ ID NO: 1266) | (SEQ ID NO: 1696) | | | | | | | | |
| PQDRCPDKRCTNPGN | LSGRSDNI | | | | | | | | |
| (SEQ ID NO: 1267) | (SEQ ID NO: 1697) | | | | | | | | |
| SRWRCPDYKCEHGKY | MIAPVAYR | | | | | | | | |
| (SEQ ID NO: 1268) | (SEQ ID NO: 1698) | | | | | | | | |
| YENQCPDLYCNRYSM | RPSPMWAY | | | | | | | | |
| (SEQ ID NO: 1269) | (SEQ ID NO: 1699) | | | | | | | | |
| TARSCPVFNCPDNNS | WATPRPMR | | | | | | | | |
| (SEQ ID NO: 1270) | (SEQ ID NO: 1700) | | | | | | | | |
| MDQRCPDAWCTSKPK | FRLLDWQW | | | | | | | | |
| (SEQ ID NO: 1271) | (SEQ ID NO: 1701) | | | | | | | | |
| GDLRCPDRLCPRHSL | ISSGL | | | | | | | | |
| (SEQ ID NO: 1272) | (SEQ ID NO: 1702) | | | | | | | | |
| IQYLCPDYHCKASNN | ISSGLLS | | | | | | | | |
| (SEQ ID NO: 1273) | (SEQ ID NO: 1703) | | | | | | | | |
| QHHRCPDRYCNSNNN | ISSGLL | | | | | | | | |
| (SEQ ID NO: 1274) | (SEQ ID NO: 1704) | | | | | | | | |
| TVALCPDYSCYHINN | ISSGLLSGRSDNH | | | | | | | | |
| (SEQ ID NO: 1275) | (SEQ ID NO: 214) | | | | | | | | |
| SPWRCPDRYCLSNHD | AVGLLAPPGGLSGRSDNH | | | | | | | | |
| (SEQ ID NO: 1276) | (SEQ ID NO: 318) | | | | | | | | |
| SSKRCPDRFCNKTHA | ISSGLLSSGGSGGSLSGRSDNH | | | | | | | | |
| (SEQ ID NO: 1277) | (SEQ ID NO: 346) | | | | | | | | |
| HTDRCPDYKCSQNHF | ISSGLLSSGGSGGSLSGRSDNH | | | | | | | | |
| (SEQ ID NO: 1278) | (SEQ ID NO: 346) | | | | | | | | |
| SRSNCTPQRCNSDYH | AVGLLAPPGGTSTSGRSANPRG | | | | | | | | |
| (SEQ ID NO: 1279) | (SEQ ID NO: 347) | | | | | | | | |
| FAARCPDKYCAIHTN | TSTSGRSANPRGGGAVGLLAPP | | | | | | | | |
| (SEQ ID NO: 1280) | (SEQ ID NO: 348) | | | | | | | | |
| GSARCPDLVCQQTKQ | VHMPLGFLGPGGTSTSGRSANPRG | | | | | | | | |
| (SEQ ID NO: 1281) | (SEQ ID NO: 349) | | | | | | | | |
| RNLMCPDKFCNKNTK | TSTSGRSANPRGGGVHMPLGFLGP | | | | | | | | |
| (SEQ ID NO: 1282) | (SEQ ID NO: 350) | | | | | | | | |
| NIRLCPDKVCTPTWV | LSGRSDNHGGAVGLLAPP | | | | | | | | |
| (SEQ ID NO: 1283) | (SEQ ID NO: 351) | | | | | | | | |
| MTDLCPDAHCAKTHM | VHMPLGFLGPGGLSGRSDNH | | | | | | | | |
| (SEQ ID NO: 1284) | (SEQ ID NO: 352) | | | | | | | | |
| PYSRLCAYPCPDFVG | LSGRSDNHGGVHMPLGFLGP | | | | | | | | |
| (SEQ ID NO: 1285) | (SEQ ID NO: 353) | | | | | | | | |
| LCGCARSPDYCKCRG | LSGRSDNHGGSGGSISSGLLSS | | | | | | | | |
| (SEQ ID NO: 1286) | (SEQ ID NO: 354) | | | | | | | | |
| WGRCERVPDCCCPRG | LSGRSGNHGGSGGSISSGLLSS | | | | | | | | |
| (SEQ ID NO: 1287) | (SEQ ID NO: 355) | | | | | | | | |
| TRNTCHTRICYGMAC | ISSGLLSSGGSGGSLSGRSGNH | | | | | | | | |
| (SEQ ID NO: 1288) | (SEQ ID NO: 356) | | | | | | | | |
| CVCTSCSSYWTLCPD | LSGRSDNHGGSGGSQNQALRMA | | | | | | | | |
| (SEQ ID NO: 1289) | (SEQ ID NO: 357) | | | | | | | | |
| LCCSRGSNCPDRCTW | QNQALRMAGGSGGSLSGRSDNH | | | | | | | | |
| (SEQ ID NO: 1290) | (SEQ ID NO: 358) | | | | | | | | |
| CCPLCQANMCPDNQS | LSGRSGNHGGSGGSQNQALRMA | | | | | | | | |
| (SEQ ID NO: 1291) | (SEQ ID NO: 359) | | | | | | | | |
| ECKLCCPDLYCGGTM | QNQALRMAGGSGGSLSGRSGNH | | | | | | | | |
| (SEQ ID NO: 1292) | (SEQ ID NO: 360) | | | | | | | | |
| CSNPMCAYCCPDLIL | ISSGLLSGRSGNH | | | | | | | | |
| (SEQ ID NO: 1293) | (SEQ ID NO: 361) | | | | | | | | |
| CPRCNTYSKHDCYHQ | ISSGLLSSGGSGGSLSGRNH | | | | | | | | |
| (SEQ ID NO: 1294) | (SEQ ID NO: 1091) | | | | | | | | |
| FCCASKMPAPSNCHT | ISSGLLSGRSANPRG | | | | | | | | |
| (SEQ ID NO: 1295) | (SEQ ID NO: 1092) | | | | | | | | |
| | AVGLLAPPTSGRSANPRG | | | | | | | | |
| | (SEQ ID NO: 1093) | | | | | | | | |
| | AVGLLAPPSGRSANPRG | | | | | | | | |
| | (SEQ ID NO: 1094) | | | | | | | | |
| | ISSGLLSGRSDDH | | | | | | | | |
| | (SEQ ID NO: 1095) | | | | | | | | |
| | ISSGLLSGRSDIH | | | | | | | | |
| | (SEQ ID NO: 1096) | | | | | | | | |
| | ISSGLLSGRSDQH | | | | | | | | |
| | (SEQ ID NO: 1097) | | | | | | | | |
| | ISSGLLSGRSDTH | | | | | | | | |
| | (SEQ ID NO: 1098) | | | | | | | | |
| | ISSGLLSGRSDYH | | | | | | | | |
| | (SEQ ID NO: 1099) | | | | | | | | |
| | ISSGLLSGRSDNP | | | | | | | | |
| | (SEQ ID NO: 1100) | | | | | | | | |
| | ISSGLLSGRSANP | | | | | | | | |
| | (SEQ ID NO: 1101) | | | | | | | | |
| | ISSGLLSGRSANI | | | | | | | | |
| | (SEQ ID NO: 1102) | | | | | | | | |
| | AVGLLAPPGGLSGRSDDH | | | | | | | | |
| | (SEQ ID NO: 1103) | | | | | | | | |
| | AVGLLAPPGGLSGRSDIH | | | | | | | | |
| | (SEQ ID NO: 1104) | | | | | | | | |
| | AVGLLAPPGGLSGRSDQH | | | | | | | | |
| | (SEQ ID NO: 1105) | | | | | | | | |
| | AVGLLAPPGGLSGRSDTH | | | | | | | | |
| | (SEQ ID NO: 1106) | | | | | | | | |
| | AVGLLAPPGGLSGRSDYH | | | | | | | | |
| | (SEQ ID NO: 1107) | | | | | | | | |
| | AVGLLAPPGGLSGRSDNP | | | | | | | | |
| | (SEQ ID NO: 1108) | | | | | | | | |
| | AVGLLAPPGGLSGRSANP | | | | | | | | |
| | (SEQ ID NO: 1109) | | | | | | | | |
| | AVGLLAPPGGLSGRSANI | | | | | | | | |
| | (SEQ ID NO: 1110) | | | | | | | | |
| | ISSGLLSGRSDNI | | | | | | | | |
| | (SEQ ID NO: 1111) | | | | | | | | |
| | AVGLLAPPGGLSGRSDNI | | | | | | | | |
| | (SEQ ID NO: 1112) | | | | | | | | |

TABLE 13C

| | | VL | VH | VL CDRs | | | VH CDRs | | |
|---|---|---|---|---|---|---|---|---|---|
| | | SEQ | SEQ | SEQ ID NO: | | | SEQ ID NO: | | |
| Mask Sequence | Substrates: | ID NO: | ID NO: | CDR1 | CDR2 | CDR3 | CDR1 | CDR2 | CDR3 |
| GCDFTSAKHNCGSGW | LSGRSDNH | 638 | 1514 | VL CDRs of SEQ ID | | | VH CDRs of SEQ ID | | |
| (SEQ ID NO: 1351) | (SEQ ID NO: 294) | | | NO: 638 | | | NO: 1514 | | |
| VGSNCWTGPACALTS | TGRGPSWV | | | 1711 | 1712 | 1713 | 1714 | 1715 | 1716 |
| (SEQ ID NO: 1352) | (SEQ ID NO: 295) | | | | | | | | |
| FCAVMFDFLSDRCLH | PLTGRSGG | | | | | | | | |
| (SEQ ID NO: 1353) | (SEQ ID NO: 296) | | | | | | | | |
| FCPPWLDYLGNKCMT | TARGPSFK | | | | | | | | |
| (SEQ ID NO: 1354) | (SEQ ID NO: 297) | | | | | | | | |
| MSCWDFSSAQGCGQH | NTLSGRSENHSG | | | | | | | | |
| (SEQ ID NO: 1355) | (SEQ ID NO: 298) | | | | | | | | |
| LMCADLHYNHYNCKY | NTLSGRSGNHGS | | | | | | | | |
| (SEQ ID NO: 1356) | (SEQ ID NO: 299) | | | | | | | | |
| ELCGWQSFSGVCTSE | TSTSGRSANPRG | | | | | | | | |
| (SEQ ID NO: 1357) | (SEQ ID NO: 300) | | | | | | | | |
| WTYENCWASCQPHLE | TSGRSANP | | | | | | | | |
| (SEQ ID NO: 1358) | (SEQ ID NO: 301) | | | | | | | | |
| KLTEDFSSAA (SEQ | VHMPLGFLGP | | | | | | | | |
| ID NO: 1359) | (SEQ ID NO: 302) | | | | | | | | |
| VGQSCFSGLVCDRQL | AVGLLAPP | | | | | | | | |
| (SEQ ID NO: 1360) | (SEQ ID NO: 303) | | | | | | | | |
| ISHYCFSGKSCRD | AQNLLGMV | | | | | | | | |
| (SEQ ID NO: 1361) | (SEQ ID NO: 304) | | | | | | | | |
| HCIPDFTSAAGDCMR | QNQALRMA | | | | | | | | |
| (SEQ ID NO: 1362) | (SEQ ID NO: 305) | | | | | | | | |
| RLVSAYSFS (SEQ ID | LAAPLGLL | | | | | | | | |
| NO: 1363) | (SEQ ID NO: 306) | | | | | | | | |
| KFHHSHPLVHDFTSA | STFPFGMF | | | | | | | | |
| (SEQ ID NO: 1364) | (SEQ ID NO: 307) | | | | | | | | |
| ASYPDFSSANGVGLR | ISSGLLSS | | | | | | | | |
| (SEQ ID NO: 1365) | (SEQ ID NO: 308) | | | | | | | | |
| GLATTLSNVDFTSAG | PAGLWLDP | | | | | | | | |
| (SEQ ID NO: 1366) | (SEQ ID NO: 309) | | | | | | | | |
| DFTSANSAFSGDAST | VAGRSMRP | | | | | | | | |
| (SEQ ID NO: 1367) | (SEQ ID NO: 310) | | | | | | | | |
| GRLPGHSVVDFTSAW | VVPEGRRS | | | | | | | | |
| (SEQ ID NO: 1368) | (SEQ ID NO: 311) | | | | | | | | |
| SGSFYSSSAFDFTSA | ILPRSPAF | | | | | | | | |
| (SEQ ID NO: 1369) | (SEQ ID NO: 312) | | | | | | | | |
| CDDFTSAQHSRINEC | MVLGRSLL | | | | | | | | |
| (SEQ ID NO: 1370) | (SEQ ID NO: 313) | | | | | | | | |
| CDFTSAQGKKCRTAL | QGRAITFI | | | | | | | | |
| (SEQ ID NO: 1371) | (SEQ ID NO: 314) | | | | | | | | |
| YYIDKYQSPSYGPVL | SPRSIMLA | | | | | | | | |
| (SEQ ID NO: 1372) | (SEQ ID NO: 315) | | | | | | | | |
| FSVARARSSADFTSS | SMLRSMPL | | | | | | | | |
| (SEQ ID NO: 1373) | (SEQ ID NO: 316) | | | | | | | | |
| DSDFTSAGSADSRSR | SARGPSRW | | | | | | | | |
| (SEQ ID NO: 1374) | (SEQ ID NO: 319) | | | | | | | | |
| CDFTSATSISKRCDH | GWHTGRN | | | | | | | | |
| (SEQ ID NO: 1375) | (SEQ ID NO: 320) | | | | | | | | |
| IESSASSWGLQASRN | HTGRSGAL | | | | | | | | |
| (SEQ ID NO: 1376) | (SEQ ID NO: 321) | | | | | | | | |
| PRYHNLNFTTPALSPGS | AARGPAIH | | | | | | | | |
| (SEQ ID NO: 1377) | (SEQ ID NO: 322) | | | | | | | | |
| DLFARFPLDRDFTSA | RGPAFNPM | | | | | | | | |
| (SEQ ID NO: 1378) | (SEQ ID NO: 323) | | | | | | | | |
| HCNFTTPPYCSSTLW | SSRGPAYL | | | | | | | | |
| (SEQ ID NO: 1379) | (SEQ ID NO: 324) | | | | | | | | |
| NVPIILLTDRQLLSG | RGPATPIM | | | | | | | | |
| (SEQ ID NO: 1380) | (SEQ ID NO: 325) | | | | | | | | |
| NPTACDFTSSMATYC | RGPA | | | | | | | | |
| (SEQ ID NO: 1381) | (SEQ ID NO: 326) | | | | | | | | |
| FVRTVRFSNSMFSVP | GGQPSGMWGW | | | | | | | | |
| (SEQ ID NO: 1382) | (SEQ ID NO: 327) | | | | | | | | |
| YDFSSASNSSPSRQT | FPRPLGITGL | | | | | | | | |
| (SEQ ID NO: 1383) | (SEQ ID NO: 328) | | | | | | | | |
| AHPDFSSAMRGNLLG | SPLTGRSG | | | | | | | | |
| (SEQ ID NO: 1384) | (SEQ ID NO: 329) | | | | | | | | |
| SSHVVHKDFTSANSR | SAGFSLPA | | | | | | | | |
| (SEQ ID NO: 1385) | (SEQ ID NO: 330) | | | | | | | | |
| CPDFTSANGGGCWQM | LAPLGLQRR | | | | | | | | |
| (SEQ ID NO: 1386) | (SEQ ID NO: 331) | | | | | | | | |
| SLGQSYPTDFTCPGC | SGGPLGVR | | | | | | | | |
| (SEQ ID NO: 1387) | (SEQ ID NO: 332) | | | | | | | | |
| ASMRSHEQRDFTSAY | PLGL | | | | | | | | |
| (SEQ ID NO: 1388) | (SEQ ID NO: 333) | | | | | | | | |
| SCQFWFTLCSGGVFH | ISSGLSS | | | | | | | | |
| (SEQ ID NO: 1389) | (SEQ ID NO: 334) | | | | | | | | |
| PYPNNRTGMHDFTSA | PVGYTSSL | | | | | | | | |
| (SEQ ID NO: 1390) | (SEQ ID NO: 335) | | | | | | | | |
| KPFPIDFTSAGTSGT | DWLYWPGI | | | | | | | | |
| (SEQ ID NO: 1391) | (SEQ ID NO: 336) | | | | | | | | |
| SIKSFIPRDDFTSAA | LKAAPRWA | | | | | | | | |
| (SEQ ID NO: 1392) | (SEQ ID NO: 337) | | | | | | | | |
| GIKNPATPFVDFTSA | GPSHLVLT | | | | | | | | |
| (SEQ ID NO: 1393) | (SEQ ID NO: 338) | | | | | | | | |
| LSHTYPRGSSTIEAS | LPGGLSPW | | | | | | | | |
| (SEQ ID NO: 1394) | (SEQ ID NO: 339) | | | | | | | | |
| PSLDFSSAT (SEQ ID | MGLFSEAG | | | | | | | | |
| NO: 1395) | (SEQ ID NO: 340) | | | | | | | | |
| AFTPRIAPTFDVMKE | SPLPLRVP | | | | | | | | |
| (SEQ ID NO: 1396) | (SEQ ID NO: 341) | | | | | | | | |
| LCGLQIPPDCERS | RMHLRSLG | | | | | | | | |
| (SEQ ID NO: 1397) | (SEQ ID NO: 342) | | | | | | | | |
| AAKMVSHSERDFTSA | LLAPSHRA | | | | | | | | |
| (SEQ ID NO: 1398) | (SEQ ID NO: 343) | | | | | | | | |
| VSVECFSGMQCPHYY | GPRSFGL | | | | | | | | |
| (SEQ ID NO: 1399) | (SEQ ID NO: 344) | | | | | | | | |
| ASKCRLPCMASTQIY | GPRSFG | | | | | | | | |
| (SEQ ID NO: 1400) | (SEQ ID NO: 345) | | | | | | | | |
| GLRSCNIYFSIPCTY | LSGRSGNH | | | | | | | | |
| (SEQ ID NO: 1401) | (SEQ ID NO: 1157) | | | | | | | | |
| RGTSDGTLDFTTARS | SGRSANPRG | | | | | | | | |
| (SEQ ID NO: 1402) | (SEQ ID NO: 1158) | | | | | | | | |
| SMYPSASRLLHPQYP | LSGRSDDH | | | | | | | | |
| (SEQ ID NO: 1403) | (SEQ ID NO: 1161) | | | | | | | | |
| HCISCYDFTSAAGSF | LSGRSDIH | | | | | | | | |
| (SEQ ID NO: 1404) | (SEQ ID NO: 1162) | | | | | | | | |
| SSGRWGDAWACARIC | LSGRSDQH | | | | | | | | |
| (SEQ ID NO: 1405) | (SEQ ID NO: 1165) | | | | | | | | |
| RVFSDFTSASHSFGG | LSGRSDTH | | | | | | | | |
| (SEQ ID NO: 1406) | (SEQ ID NO: 1166) | | | | | | | | |
| TDRHSASGRDFTSAH | LSGRSDYH | | | | | | | | |
| (SEQ ID NO: 1407) | (SEQ ID NO: 1169) | | | | | | | | |
| AHCEDFSSAERIATMGC | LSGRSDNP | | | | | | | | |
| (SEQ ID NO: 1408) | (SEQ ID NO: 1520) | | | | | | | | |
| ACDPYSFSIPCDDRL | LSGRSANP | | | | | | | | |
| (SEQ ID NO: 1409) | (SEQ ID NO: 1695) | | | | | | | | |
| NSPFTLSHIYDR (SEQ | LSGRSANI | | | | | | | | |
| ID NO: 1410) | (SEQ ID NO: 1696) | | | | | | | | |
| IGINFTTPSAFVAFP | LSGRSDNI | | | | | | | | |
| (SEQ ID NO: 1411) | (SEQ ID NO: 1697) | | | | | | | | |
| RDAFPIYRNADFSTP | MIAPVAYR | | | | | | | | |
| (SEQ ID NO: 1412) | (SEQ ID NO: 1698) | | | | | | | | |
| SIPNASSYNFTSSSG | RPSPMWAY | | | | | | | | |
| (SEQ ID NO: 1413) | (SEQ ID NO: 1699) | | | | | | | | |
| AGIPDKRHTYDFTSA | WATPRPMR | | | | | | | | |
| (SEQ ID NO: 1414) | (SEQ ID NO: 1700) | | | | | | | | |
| WPLAHDSRDWNFTTP | FRLLDWQW | | | | | | | | |
| (SEQ ID NO: 1415) | (SEQ ID NO: 1701) | | | | | | | | |
| RHSPSSGHVDFTSAG | ISSGL | | | | | | | | |
| (SEQ ID NO: 1416) | (SEQ ID NO: 1702) | | | | | | | | |
| SCFAWTDPVWNRCSW | ISSGLLS | | | | | | | | |
| (SEQ ID NO: 1417) | (SEQ ID NO: 1703) | | | | | | | | |
| MPCDWTGPGKIWCGG | ISSGLL | | | | | | | | |
| (SEQ ID NO: 1418) | (SEQ ID NO: 1704) | | | | | | | | |
| RDCDFSTANFRSCNK | ISSGLLSGRSDNH | | | | | | | | |
| (SEQ ID NO: 1419) | (SEQ ID NO: 214) | | | | | | | | |
| LSCVVSPNYLHCNDH | AVGLLAPPGGLSGRSDNH | | | | | | | | |
| (SEQ ID NO: 1420) | (SEQ ID NO: 318) | | | | | | | | |
| FVCGLYSFSGVCQGV | ISSGLLSSGGSGGSLSGRSDNH | | | | | | | | |
| (SEQ ID NO: 1421) | (SEQ ID NO: 346) | | | | | | | | |
| IGLMCFSGLQCPMLA | ISSGLLSSGGSGGSLSGRSDNH | | | | | | | | |
| (SEQ ID NO: 1422) | (SEQ ID NO: 346) | | | | | | | | |
| PGMNCFSGEICQMST | AVGLLAPPGGTSTSGRSANPRG | | | | | | | | |
| (SEQ ID NO: 1423) | (SEQ ID NO: 347) | | | | | | | | |
| GDVGSCWASCGLQGG | TSTSGRSANPRGGGAVGLLAPP | | | | | | | | |
| (SEQ ID NO: 1424) | (SEQ ID NO: 348) | | | | | | | | |
| SQFQDCWASCGASFT | VHMPLGFLGPGGTSTSGRSANPRG | | | | | | | | |
| (SEQ ID NO: 1425) | (SEQ ID NO: 349) | | | | | | | | |
| VGSLNCWYSCGDIWL | TSTSGRSANPRGGGVHMPLGFLGP | | | | | | | | |
| (SEQ ID NO: 1426) | (SEQ ID NO: 350) | | | | | | | | |
| MCESWLNFLGDQCGM | LSGRSDNHGGAVGLLAPP | | | | | | | | |
| (SEQ ID NO: 1427) | (SEQ ID NO: 351) | | | | | | | | |
| RCMISQSSFSGMCGM | VHMPLGFLGPGGLSGRSDNH | | | | | | | | |
| (SEQ ID NO: 1428) | (SEQ ID NO: 352) | | | | | | | | |
| NCAPWTSNMSNHCLK | LSGRSDNHGGVHMPLGFLGP | | | | | | | | |
| (SEQ ID NO: 1429) | (SEQ ID NO: 353) | | | | | | | | |
| LCGVGSATGLELCGV | LSGRSDNHGGSGGSISSGLLSS | | | | | | | | |
| (SEQ ID NO: 1430) | (SEQ ID NO: 354) | | | | | | | | |
| GCDFSSLGGRQPCTP | LSGRSGNHGGSGGSISSGLLSS | | | | | | | | |
| (SEQ ID NO: 1431) | (SEQ ID NO: 355) | | | | | | | | |
| MGCNFTTYPYHTCNT | ISSGLLSSGGSGGSLSGRSGNH | | | | | | | | |
| (SEQ ID NO: 1432) | (SEQ ID NO: 356) | | | | | | | | |
| GSCDFTSGAGKKCGS | LSGRSDNHGGSGGSQNQALRMA | | | | | | | | |
| (SEQ ID NO: 1433) | (SEQ ID NO: 357) | | | | | | | | |
| VSCDFTSSHARMCSR | QNQALRMAGGSGGSLSGRSDNH | | | | | | | | |
| (SEQ ID NO: 1434) | (SEQ ID NO: 358) | | | | | | | | |
| MRCIDFYYNHINCIG | LSGRSGNHGGSGGSQNQALRMA | | | | | | | | |
| (SEQ ID NO: 1435) | (SEQ ID NO: 359) | | | | | | | | |
| RSCDFTSAANKYCAT | QNQALRMAGGSGGSLSGRSGNH | | | | | | | | |
| (SEQ ID NO: 1436) | (SEQ ID NO: 360) | | | | | | | | |
| LYCDSFSVPRPNCAP | ISSGLLSGRSGNH | | | | | | | | |
| (SEQ ID NO: 1437) | (SEQ ID NO: 361) | | | | | | | | |
| NSCDFTSARVSKCST | ISSGLLSSGGSGGSLSGRNH | | | | | | | | |
| (SEQ ID NO: 1438) | (SEQ ID NO: 1091) | | | | | | | | |
| STCSDNFTTPMPCNT | ISSGLLSGRSANPRG | | | | | | | | |
| (SEQ ID NO: 1439) | (SEQ ID NO: 1092) | | | | | | | | |
| DICNDRPNLTHCHYF | AVGLLAPPTSGRSANPRG | | | | | | | | |
| (SEQ ID NO: 1440) | (SEQ ID NO: 1093) | | | | | | | | |
| LRCDDFTSAIGCRGY | AVGLLAPPSGRSANPRG | | | | | | | | |
| (SEQ ID NO: 1441) | (SEQ ID NO: 1094) | | | | | | | | |
| EGCDFTSALHSCNNY | ISSGLLSGRSDDH | | | | | | | | |
| (SEQ ID NO: 1442) | (SEQ ID NO: 1095) | | | | | | | | |
| RKGCGDFTSASCFVV | ISSGLLSGRSDIH | | | | | | | | |
| (SEQ ID NO: 1443) | (SEQ ID NO: 1096) | | | | | | | | |
| GMLCAGSSFGLCESM | ISSGLLSGRSDQH | | | | | | | | |
| (SEQ ID NO: 1444) | (SEQ ID NO: 1097) | | | | | | | | |
| RESCFGSSLGLCTNK | ISSGLLSGRSDTH | | | | | | | | |
| (SEQ ID NO: 1445) | (SEQ ID NO: 1098) | | | | | | | | |
| ILRCYDIPTNCMNFN | ISSGLLSGRSDYH | | | | | | | | |
| (SEQ ID NO: 1446) | (SEQ ID NO: 1099) | | | | | | | | |
| NSECTFGAMYCRNKP | ISSGLLSGRSDNP | | | | | | | | |
| (SEQ ID NO: 1447) | (SEQ ID NO: 1100) | | | | | | | | |
| ASGCFDEDIRCSGGA | ISSGLLSGRSANP | | | | | | | | |
| (SEQ ID NO: 1448) | (SEQ ID NO: 1101) | | | | | | | | |
| HYFCNQSNPSCQTAP | ISSGLLSGRSANI | | | | | | | | |
| (SEQ ID NO: 1449) | (SEQ ID NO: 1102) | | | | | | | | |
| AMGCELGGAGCIGSP | AVGLLAPPGGLSGRSDDH | | | | | | | | |
| (SEQ ID NO: 1450) | (SEQ ID NO: 1103) | | | | | | | | |
| TLKCHMPRKLCANDP | AVGLLAPPGGLSGRSDIH | | | | | | | | |
| (SEQ ID NO: 1451) | (SEQ ID NO: 1104) | | | | | | | | |
| RPACRDLPHNCITST | AVGLLAPPGGLSGRSDQH | | | | | | | | |
| (SEQ ID NO: 1452) | (SEQ ID NO: 1105) | | | | | | | | |
| QMSCHGNFTTCHSNP | AVGLLAPPGGLSGRSDTH | | | | | | | | |
| (SEQ ID NO: 1453) | (SEQ ID NO: 1106) | | | | | | | | |
| LTGCARGARPCRLRV | AVGLLAPPGGLSGRSDYH | | | | | | | | |
| (SEQ ID NO: 1454) | (SEQ ID NO: 1107) | | | | | | | | |
| WSELCLAGPSCGWVG | AVGLLAPPGGLSGRSDNP | | | | | | | | |
| (SEQ ID NO: 1455) | (SEQ ID NO: 1108) | | | | | | | | |
| VTKSCWQLPHCITAP | AVGLLAPPGGLSGRSANP | | | | | | | | |
| (SEQ ID NO: 1456) | (SEQ ID NO: 1109) | | | | | | | | |
| KAASCPHNQICNMTA | AVGLLAPPGGLSGRSANI | | | | | | | | |
| (SEQ ID NO: 1457) | (SEQ ID NO: 1110) | | | | | | | | |
| VSKNCFSGMMCPVFA | ISSGLLSGRSDNI | | | | | | | | |
| (SEQ ID NO: 1458) | (SEQ ID NO: 1111) | | | | | | | | |
| NRSSCWTGPTCHVLH | AVGLLAPPGGLSGRSDNI | | | | | | | | |
| (SEQ ID NO: 1459) | (SEQ ID NO: 1112) | | | | | | | | |
| ARTGCSGPVCLNDVS | | | | | | | | | |
| (SEQ ID NO: 1460) | | | | | | | | | |
| STRTCLAFTCINGNT | | | | | | | | | |
| (SEQ ID NO: 1461) | | | | | | | | | |
| MLDGNCWYACSYKNT | | | | | | | | | |
| (SEQ ID NO: 1462) | | | | | | | | | |
| FSRSDCWSACAPWRV | | | | | | | | | |
| (SEQ ID NO: 1463) | | | | | | | | | |
| GGRMDCWASCQPLSR | | | | | | | | | |
| (SEQ ID NO: 1464) | | | | | | | | | |
| NSPHSCMTNCDFTSA | | | | | | | | | |
| (SEQ ID NO: 1465) | | | | | | | | | |

TABLE 13D

| | | | | LC CDRs | | | HC CDRs | | |
|---|---|---|---|---|---|---|---|---|---|
| | | LC | HC | SEQ ID NO: | | | SEQ ID NO: | | |
| Mask Sequence | Substrates: | SEQ ID NO: | SEQ ID NO: | CDR1 | CDR2 | CDR3 | CDR1 | CDR2 | CDR3 |

| | | | | | |
|---|---|---|---|---|---|
| DYTYCRWVNWCLSGV | LSGRSDNH | 543 | 546 | LC CDRs of | HC CDRs of |
| (SEQ ID NO: 384) | (SEQ ID NO: 294) | | | SEQ ID NO: 543 | SEQ ID NO: 546 |
| ILCPEDPWGHKCKLP | TGRGPSWV | | | | |
| (SEQ ID NO: 385) | (SEQ ID NO: 295) | | | | |
| TNIWSCQTYCDHKHK | PLTGRSGG | | | | |
| (SEQ ID NO: 386) | (SEQ ID NO: 296) | | | | |
| SDHKCKLQNCMNTKV | TARGPSFK | | | | |
| (SEQ ID NO: 387) | (SEQ ID NO: 297) | | | | |
| PGNCHPMQKEMCQFI | NTLSGRSENHSG | | | | |
| (SEQ ID NO: 388) | (SEQ ID NO: 298) | | | | |
| VEHLCYTHNKCKHPD | NTLSGRSGNHGS | | | | |
| (SEQ ID NO: 389) | (SEQ ID NO: 299) | | | | |
| TIPRCGQHPKCKDTL | TSTSGRSANPRG | | | | |
| (SEQ ID NO: 390) | (SEQ ID NO: 300) | | | | |
| ACRICQDHPKTKWNS | TSGRSANP | | | | |
| (SEQ ID NO: 391) | (SEQ ID NO: 301) | | | | |
| LIQCTGNLDHKCKHY | VHMPLGFLGP | | | | |
| (SEQ ID NO: 392) | (SEQ ID NO: 302) | | | | |
| IPCHHSADHKHKCTS | AVGLLAPP | | | | |
| (SEQ ID NO: 393) | (SEQ ID NO: 303) | | | | |
| SRQICADYNCHNKYK | AQNLLGMV | | | | |
| (SEQ ID NO: 394) | (SEQ ID NO: 304) | | | | |
| QPCNPQIDHKIKCIY | QNQALRMA | | | | |
| (SEQ ID NO: 395) | (SEQ ID NO: 305) | | | | |
| HYTICMTHNKCKDMA | LAAPLGLL | | | | |
| (SEQ ID NO: 396) | (SEQ ID NO: 306) | | | | |
| ANSCLAVEHKCKHNY | STFPFGMF | | | | |
| (SEQ ID NO: 397) | (SEQ ID NO: 307) | | | | |
| AALHCTEHKCKNHIK | ISSGLLSS | | | | |
| (SEQ ID NO: 398) | (SEQ ID NO: 308) | | | | |
| APCIINTVDWKSCEI | PAGLWLDP | | | | |
| (SEQ ID NO: 399) | (SEQ ID NO: 309) | | | | |
| ATNWCTHKQKCKQDM | VAGRSMRP | | | | |
| (SEQ ID NO: 400) | (SEQ ID NO: 310) | | | | |
| DCYNEHKLKTRVCNN | VVPEGRRS | | | | |
| (SEQ ID NO: 401) | (SEQ ID NO: 311) | | | | |
| DEMQCSHKQKCTNSK | ILPRSPAF | | | | |
| (SEQ ID NO: 402) | (SEQ ID NO: 312) | | | | |
| DVGICSQHNKCKPTK | MVLGRSLL | | | | |
| (SEQ ID NO: 403) | (SEQ ID NO: 313) | | | | |
| EKYCSSDDHKCKITL | QGRAITFI | | | | |
| (SEQ ID NO: 404) | (SEQ ID NO: 314) | | | | |
| ELECSHNKVKNCIQI | SPRSIMLA | | | | |
| (SEQ ID NO: 405) | (SEQ ID NO: 315) | | | | |
| ELHPCNTHKCKPIVN | SMLRSMPL | | | | |
| (SEQ ID NO: 406) | (SEQ ID NO: 316) | | | | |
| EVGSCNHPKCKSNNY | SARGPSRW | | | | |
| (SEQ ID NO: 407) | (SEQ ID NO: 319) | | | | |
| EYSPSLAHPKLKDNA | GWHTGRN | | | | |
| (SEQ ID NO: 408) | (SEQ ID NO: 320) | | | | |
| FESLHPKGKHPEDLG | HTGRSGAL | | | | |
| (SEQ ID NO: 409) | (SEQ ID NO: 321) | | | | |
| FPLCVRADRVCGDAQ | AARGPAIH | | | | |
| (SEQ ID NO: 410) | (SEQ ID NO: 322) | | | | |
| FQAPPASHNKLKPSL | RGPAFNPM | | | | |
| (SEQ ID NO: 411) | (SEQ ID NO: 323) | | | | |
| GAIDSCHHKCKSPHY | SSRGPAYL | | | | |
| (SEQ ID NO: 412) | (SEQ ID NO: 324) | | | | |
| GKIYTCEHNCTFGYS | RGPATPIM | | | | |
| (SEQ ID NO: 413) | (SEQ ID NO: 325) | | | | |
| HCTVNNHSSDHKCKI | RGPA | | | | |
| (SEQ ID NO: 414) | (SEQ ID NO: 326) | | | | |
| HGTQCTHNKCKPILS | GGQPSGMWGW | | | | |
| (SEQ ID NO: 415) | (SEQ ID NO: 327) | | | | |
| HIGWCLHPKCKTTTT | FPRPLGITGL | | | | |
| (SEQ ID NO: 416) | (SEQ ID NO: 328) | | | | |
| HLRTCIQKWCEHKMK | SPLTGRSG | | | | |
| (SEQ ID NO: 417) | (SEQ ID NO: 329) | | | | |
| HTDCTMMSNHKCKIN | SAGFSLPA | | | | |
| (SEQ ID NO: 418) | (SEQ ID NO: 330) | | | | |
| IRQQCTALACLLKVH | LAPLGLQRR | | | | |
| (SEQ ID NO: 419) | (SEQ ID NO: 331) | | | | |
| KGCSTHKMRAYCNQM | SGGPLGVR | | | | |
| (SEQ ID NO: 420) | (SEQ ID NO: 332) | | | | |
| KMFTPCKIWCNNSYN | PLGL | | | | |
| (SEQ ID NO: 421) | (SEQ ID NO: 333) | | | | |
| KTMCSGHKQKCNNSS | ISSGLSS | | | | |
| (SEQ ID NO: 422) | (SEQ ID NO: 334) | | | | |
| LACHSASLVDHKCKL | PVGYTSSL | | | | |
| (SEQ ID NO: 423) | (SEQ ID NO: 335) | | | | |
| LCNVSMDHKHKPCYL | DWLYWPGI | | | | |
| (SEQ ID NO: 424) | (SEQ ID NO: 336) | | | | |
| LGLNCFSEHKCKEHM | LKAAPRWA | | | | |
| (SEQ ID NO: 425) | (SEQ ID NO: 337) | | | | |
| LGTCTHKHKNCNYTL | GPSHLVLT | | | | |
| (SEQ ID NO: 426) | (SEQ ID NO: 338) | | | | |
| LHEGCTTHNKCKPIA | LPGGLSPW | | | | |
| (SEQ ID NO: 427) | (SEQ ID NO: 339) | | | | |
| LKRSCTGHWTCYTNW | MGLFSEAG | | | | |
| (SEQ ID NO: 428) | (SEQ ID NO: 340) | | | | |
| LQRCTHKEKYCHAIH | SPLPLRVP | | | | |
| (SEQ ID NO: 429) | (SEQ ID NO: 341) | | | | |
| LSHCYDHKRKCSYIV | RMHLRSLG | | | | |
| (SEQ ID NO: 430) | (SEQ ID NO: 342) | | | | |
| LSKCHNKEKNCSNNN | LLAPSHRA | | | | |
| (SEQ ID NO: 431) | (SEQ ID NO: 343) | | | | |
| MDTCEMHKQKCRPSF | GPRSFGL | | | | |
| (SEQ ID NO: 432) | (SEQ ID NO: 344) | | | | |
| MHNECLTHKCKVPIT | GPRSFG | | | | |
| (SEQ ID NO: 433) | (SEQ ID NO: 345) | | | | |
| MLTLCNTNACHKEKN | LSGRSGNH | | | | |
| (SEQ ID NO: 434) | (SEQ ID NO: 1157) | | | | |
| MRPCLNNLEHKCKHY | SGRSANPRG | | | | |
| (SEQ ID NO: 435) | (SEQ ID NO: 1158) | | | | |
| MSRCPTHKMKCSLNI | LSGRSDDH | | | | |
| (SEQ ID NO: 436) | (SEQ ID NO: 1161) | | | | |
| MWICQEHKLKCMTDT | LSGRSDIH | | | | |
| (SEQ ID NO: 437) | (SEQ ID NO: 1162) | | | | |
| MYYCKRRSAFYCTLN | LSGRSDQH | | | | |
| (SEQ ID NO: 438) | (SEQ ID NO: 1165) | | | | |
| NDCQHDKQMHKCKMH | LSGRSDTH | | | | |
| (SEQ ID NO: 439) | (SEQ ID NO: 1166) | | | | |
| NFGPCPMLLGCFGFR | LSGRSDYH | | | | |
| (SEQ ID NO: 440) | (SEQ ID NO: 1169) | | | | |
| NHTDCSHPKCKSHDS | LSGRSDNP | | | | |
| (SEQ ID NO: 441) | (SEQ ID NO: 1520) | | | | |
| NLNCPHKQKNCDKYH | LSGRSANP | | | | |
| (SEQ ID NO: 442) | (SEQ ID NO: 1695) | | | | |
| NPQCTPIDHKCKTHH | LSGRSANI | | | | |
| (SEQ ID NO: 443) | (SEQ ID NO: 1696) | | | | |
| NTTSCTHPKCKHQGK | LSGRSDNI | | | | |
| (SEQ ID NO: 444) | (SEQ ID NO: 1697) | | | | |
| NVGGCDNYGCHKLKN | MIAPVAYR | | | | |
| (SEQ ID NO: 445) | (SEQ ID NO: 1698) | | | | |
| PCSPGNLTWDHKCKY | RPSPMWAY | | | | |
| (SEQ ID NO: 446) | (SEQ ID NO: 1699) | | | | |
| PFTKCHGFNKCKEHT | WATPRPMR | | | | |
| (SEQ ID NO: 447) | (SEQ ID NO: 1700) | | | | |
| PGDKCTHKEKCYYNN | FRLLDWQW | | | | |
| (SEQ ID NO: 448) | (SEQ ID NO: 1701) | | | | |
| PNICNLDHKRKCRIN | ISSGL | | | | |
| (SEQ ID NO: 449) | (SEQ ID NO: 1702) | | | | |
| PQLACKHPKCKDAGN | ISSGLLS | | | | |
| (SEQ ID NO: 450) | (SEQ ID NO: 1703) | | | | |
| PSCTMWTHGGVCKHA | ISSGLL | | | | |
| (SEQ ID NO: 451) | (SEQ ID NO: 1704) | | | | |
| PSHRHPLAKPGFRVE | ISSGLLSGRSDNH | | | | |
| (SEQ ID NO: 452) | (SEQ ID NO: 214) | | | | |
| PTCFKTHNKSKCNRV | AVGLLAPPGGLSGRSDNH | | | | |
| (SEQ ID NO: 453) | (SEQ ID NO: 318) | | | | |
| PTPVCHHNFHCFGYD | ISSGLLSSGGSGGSLSGRSDNH | | | | |
| (SEQ ID NO: 454) | (SEQ ID NO: 346) | | | | |
| QATCQWKKRSKCHNK | ISSGLLSSGGSGGSLSGRSDNH | | | | |
| (SEQ ID NO: 455) | (SEQ ID NO: 346) | | | | |
| QHSWCQHKAKCNYGN | AVGLLAPPGGTSTSGRSANPRG | | | | |
| (SEQ ID NO: 456) | (SEQ ID NO: 347) | | | | |
| QNCSPTYTTHKCKLT | TSTSGRSANPRGGGAVGLLAPP | | | | |
| (SEQ ID NO: 457) | (SEQ ID NO: 348) | | | | |
| QSSNCEHKRKCSSIS | VHMPLGFLGPGGTSTSGRSANPRG | | | | |
| (SEQ ID NO: 458) | (SEQ ID NO: 349) | | | | |
| RPCLLGLVPDHKCKL | TSTSGRSANPRGGGVHMPLGFLGP | | | | |
| (SEQ ID NO: 459) | (SEQ ID NO: 350) | | | | |
| RRSCMRSINTCKQKY | LSGRSDNHGGAVGLLAPP | | | | |
| (SEQ ID NO: 460) | (SEQ ID NO: 351) | | | | |
| RSSCPTVTPQNCENQ | VHMPLGFLGPGGLSGRSDNH | | | | |
| (SEQ ID NO: 461) | (SEQ ID NO: 352) | | | | |
| RTMCLDLNHKCKPSN | LSGRSDNHGGVHMPLGFLGP | | | | |
| (SEQ ID NO: 462) | (SEQ ID NO: 353) | | | | |
| RTYWCTNHNKCKHNM | LSGRSDNHGGSGGSISSGLLSS | | | | |
| (SEQ ID NO: 463) | (SEQ ID NO: 354) | | | | |
| RVENCEHNQYCHKWK | LSGRSGNHGGSGGSISSGLLSS | | | | |
| (SEQ ID NO: 464) | (SEQ ID NO: 355) | | | | |
| SCHEDDHKNKNICSL | ISSGLLSSGGSGGSLSGRSGNH | | | | |
| (SEQ ID NO: 465) | (SEQ ID NO: 356) | | | | |
| SDTCVMNHPKCKRDN | LSGRSDNHGGSGGSQNQALRMA | | | | |
| (SEQ ID NO: 466) | (SEQ ID NO: 357) | | | | |
| SSTCFHPNQKECMTK | QNQALRMAGGSGGSLSGRSDNH | | | | |
| (SEQ ID NO: 467) | (SEQ ID NO: 358) | | | | |
| SSYCGGITMRCRRAM | LSGRSGNHGGSGGSQNQALRMA | | | | |
| (SEQ ID NO: 468) | (SEQ ID NO: 359) | | | | |
| STGYCTYVNWCNYTN | QNQALRMAGGSGGSLSGRSGNH | | | | |
| (SEQ ID NO: 469) | (SEQ ID NO: 360) | | | | |
| THKCKLHLQVCTQTT | ISSGLLSGRSGNH | | | | |
| (SEQ ID NO: 470) | (SEQ ID NO: 361) | | | | |
| TMNCTHPKQKCQHTN | ISSGLLSSGGSGGSLSGRNH | | | | |
| (SEQ ID NO: 471) | (SEQ ID NO: 1091) | | | | |
| TNVLCESHNCDHKNK | ISSGLLSGRSANPRG | | | | |
| (SEQ ID NO: 472) | (SEQ ID NO: 1092) | | | | |
| TQHAASLGVEHKSKI | AVGLLAPPTSGRSANPRG | | | | |
| (SEQ ID NO: 473) | (SEQ ID NO: 1093) | | | | |
| TQLPCFDDHKCKNTN | AVGLLAPPSGRSANPRG | | | | |
| (SEQ ID NO: 474) | (SEQ ID NO: 1094) | | | | |
| TSDSCMRQKCEHKEK | ISSGLLSGRSDDH | | | | |
| (SEQ ID NO: 475) | (SEQ ID NO: 1095) | | | | |
| TTCDDHKYKHKCAQL | ISSGLLSGRSDIH | | | | |
| (SEQ ID NO: 476) | (SEQ ID NO: 1096) | | | | |
| TTCGAHKEKQHCIYT | ISSGLLSGRSDQH | | | | |
| (SEQ ID NO: 477) | (SEQ ID NO: 1097) | | | | |
| TTYCAYWHNKCKFET | ISSGLLSGRSDTH | | | | |
| (SEQ ID NO: 478) | (SEQ ID NO: 1098) | | | | |
| VGPTCGHAKCKQSEV | ISSGLLSGRSDYH | | | | |
| (SEQ ID NO: 479) | (SEQ ID NO: 1099) | | | | |
| VSHPCNTHKCKTNIV | ISSGLLSGRSDNP | | | | |
| (SEQ ID NO: 480) | (SEQ ID NO: 1100) | | | | |
| WDCRNTSHPKLKCHN | ISSGLLSGRSANP | | | | |
| (SEQ ID NO: 481) | (SEQ ID NO: 1101) | | | | |
| WSPCNSDHKRKCNNG | ISSGLLSGRSANI | | | | |
| (SEQ ID NO: 482) | (SEQ ID NO: 1102) | | | | |
| YANMSCEYDCHKMKY | AVGLLAPPGGLSGRSDDH | | | | |
| (SEQ ID NO: 483) | (SEQ ID NO: 1103) | | | | |
| YANPCTHKEKCHFKN | AVGLLAPPGGLSGRSDIH | | | | |
| (SEQ ID NO: 484) | (SEQ ID NO: 1104) | | | | |
| YDCSPSWTHPKCKHK | AVGLLAPPGGLSGRSDQH | | | | |
| (SEQ ID NO: 485) | (SEQ ID NO: 1105) | | | | |
| YGWTCTTHPKCKTTN | AVGLLAPPGGLSGRSDTH | | | | |
| (SEQ ID NO: 486) | (SEQ ID NO: 1106) | | | | |
| YQKCHPKAKDCGNNT | AVGLLAPPGGLSGRSDYH | | | | |
| (SEQ ID NO: 487) | (SEQ ID NO: 1107) | | | | |
| YWECPNMEHNKCKNN | AVGLLAPPGGLSGRSDNP | | | | |
| (SEQ ID NO: 488) | (SEQ ID NO: 1108) | | | | |
| PMGNRYCVLDHPKLK | AVGLLAPPGGLSGRSANP | | | | |
| (SEQ ID NO: 489) | (SEQ ID NO: 1109) | | | | |
| GHKSCCQKHCEYTQT | AVGLLAPPGGLSGRSANI | | | | |
| (SEQ ID NO: 490) | (SEQ ID NO: 1110) | | | | |
| LYLEMCSCCCWESIT | ISSGLLSGRSDNI | | | | |
| (SEQ ID NO: 491) | (SEQ ID NO: 1111) | | | | |
| ACQAQHCYKTYACKP | AVGLLAPPGGLSGRSDNI | | | | |
| (SEQ ID NO: 492) | (SEQ ID NO: 1112) | | | | |
| CCYTCSVHPKCKNQL | | | | | |
| (SEQ ID NO: 493) | | | | | |
| CKHRCSHKEKCPANH | | | | | |
| (SEQ ID NO: 494) | | | | | |
| CHVLFCLMQCCRWSL | | | | | |
| (SEQ ID NO: 495) | | | | | |
| LNSSLVFDHPKAKPN | | | | | |
| (SEQ ID NO: 496) | | | | | |
| MCLLCRSKFGCKVKG | | | | | |
| (SEQ ID NO: 497) | | | | | |
| IICNDHKCKQNQCNN | | | | | |
| (SEQ ID NO: 498) | | | | | |
| IRCSLRDSLCGCERM | | | | | |
| (SEQ ID NO: 499) | | | | | |
| TSCQPPKHKCTCNHG | | | | | |
| (SEQ ID NO: 500) | | | | | |
| TQCPHRCVKPNCWLH | | | | | |
| (SEQ ID NO: 501) | | | | | |
| KCCETKRNHKHCTYK | | | | | |
| (SEQ ID NO: 502) | | | | | |
| LPHCCHKAKHCNHTS | | | | | |
| (SEQ ID NO: 503) | | | | | |
| PAMCAAIHEKCCIKV | | | | | |
| (SEQ ID NO: 504) | | | | | |
| PRSCGNQLCPCHYYK | | | | | |
| (SEQ ID NO: 505) | | | | | |
| TNKCSCNHNMKCINY | | | | | |
| (SEQ ID NO: 506) | | | | | |
| VETCCQHNKCKYPFI | | | | | |
| (SEQ ID NO: 507) | | | | | |
| IFCCSNHEDHKCKTN | | | | | |
| (SEQ ID NO: 508) | | | | | |
| VCRLICPLTCVIGVG | | | | | |
| (SEQ ID NO: 509) | | | | | |
| FHGCCSVYSCLTNPG | | | | | |
| (SEQ ID NO: 510) | | | | | |
| ALACHPKQKPLEGQL | | | | | |
| (SEQ ID NO: 511) | | | | | |
| SIICCATSSCPLKHL | | | | | |
| (SEQ ID NO: 512) | | | | | |
| APCCRPHKEKPIDSR | | | | | |
| (SEQ ID NO: 513) | | | | | |
| WELCCPSADCRVAMG | | | | | |
| (SEQ ID NO: 514) | | | | | |
| QDHPKTKWNS (SEQ | | | | | |
| ID NO: 548) | | | | | |
| ACRICQDHPATKWNS | | | | | |
| (SEQ ID NO: 549) | | | | | |
| ACRICQDHPKTAWNS | | | | | |
| (SEQ ID NO: 550) | | | | | |
| ACRICQDAPKTKWNS | | | | | |
| (SEQ ID NO: 551) | | | | | |
| ACRICQDHAKTKWNS | | | | | |
| (SEQ ID NO: 552) | | | | | |
| DHPATKWNS | | | | | |
| (SEQ ID NO: 553) | | | | | |
| DHPKTAWNS | | | | | |
| (SEQ ID NO: 554) | | | | | |
| DAPKTKWNS | | | | | |
| (SEQ ID NO: 555) | | | | | |
| DAPATKWNS | | | | | |
| (SEQ ID NO: 556) | | | | | |
| ACRICQDHP | | | | | |
| (SEQ ID NO: 557) | | | | | |
| HPQSKDTL | | | | | |
| (SEQ ID NO: 558) | | | | | |
| HPKSQDTL | | | | | |
| (SEQ ID NO: 559) | | | | | |
| TIPRCGQHPLCLDTL | | | | | |
| (SEQ ID NO: 560) | | | | | |
| HPLSLDTL | | | | | |
| (SEQ ID NO: 561) | | | | | |
| HPASKDTL | | | | | |
| (SEQ ID NO: 562) | | | | | |
| HPKSADTL | | | | | |
| (SEQ ID NO: 563) | | | | | |
| PGNCHPLQKELCQFI | | | | | |
| (SEQ ID NO: 564) | | | | | |
| HPLQKELAQFI | | | | | |
| (SEQ ID NO: 565) | | | | | |
| HPLALELAQFI | | | | | |
| (SEQ ID NO: 566) | | | | | |
| PGNCHPLQLELCQFI | | | | | |
| (SEQ ID NO: 567) | | | | | |
| TNIWSCQTYCDHAHA | | | | | |
| (SEQ ID NO: 568) | | | | | |
| TNIWSCQTYCDHAHL | | | | | |
| (SEQ ID NO: 569) | | | | | |
| TNIWSCQTYCDHLHA | | | | | |
| (SEQ ID NO: 570) | | | | | |
| TNIWSCQTYCDHKHA | | | | | |
| (SEQ ID NO: 571) | | | | | |

[0854] Any of the combinations described in Tables 13A, 13B, 13C, and/or 13D can be combined with human immunoglobulin constant regions to result in fully humanized IgGs including IgG1, IgG2, IgG4 or mutated constant regions to result in human IgGs with altered functions such as IgG1 N297A, IgG1 N297Q, or IgG4 S228P. Additional examples are known to those skilled in the art. Examples of Ig heavy chain constant region amino acids in which mutations in at least one amino acid leads to reduced Fc function include, but are not limited to, mutations in amino acid 228, 233, 234, 235, 236, 237, 239, 252, 254, 256, 265, 270, 297, 318, 320, 322, 327, 329, 330, and 331 of the heavy constant region. Examples of combinations of mutated amino acids are also known in the art, such as, but not limited to a combination of mutations in amino acids 234, 235, and 331, such as L234F, L235E, and P331S or a combination of amino acids 318, 320, and 322, such as E318A, K320A, and K322A.

[0855] As an example a masking moiety comprising SEQ ID NO: 66 can be combined with a substrate comprising SEQ ID NO: 294, and a VL region comprising SEQ ID NO: 39 in combination with a human kappa constant domain comprising SEQ ID NO: 61 to produce a light chain comprising SEQ ID NO: 380. In some embodiments, for example, a VH region comprising SEQ ID NO: 21 can be combined a with human immunoglobulin heavy chain constant domain to give an IgG1 heavy chain (SEQ ID NO: 2048), an IgG4 heavy chain (SEQ ID NO: 2051), an IgG4 S228P heavy chain (SEQ ID NO: 2047), a mutated IgG1 N297A heavy chain (SEQ ID NO: 2049) or a mutated IgG1 N297Q heavy chain (SEQ ID NO: 2050). Co-expression of SEQ ID NO: 380 with SEQ ID NO: 2048 will yield an IgG1 anti-PD-1 activatable antibody. Co-expression of SEQ ID NO: 380 with SEQ ID NO: 2051 will yield an IgG4 anti-PD-1 activatable antibody. Co-expression of SEQ ID NO: 380 with SEQ ID NO: 2047 will yield an IgG4S228P anti-PD-1 activatable antibody. Co-expression of SEQ ID NO: 380 with SEQ ID NO: 2049 will yield an IgG1 N297A anti-PD-1 activatable antibody. Co-expression of SEQ ID NO: 380 with SEQ ID NO: 2050 will yield an IgG1 N297Q anti-PD-1 activatable antibody.

[0856] In some embodiments, a masking moiety comprising SEQ ID NO: 99 is combined with a substrate comprising SEQ ID NO: 214 and a VL region comprising SEQ ID NO: 47 in combination with a human kappa constant domain comprising SEQ ID NO: 61 to produce a light chain comprising SEQ ID NO: 2055. In some embodiments, spacer QGQSGQG (SEQ ID NO: 362) is added to the N-terminus of SEQ ID NO: 2055 to form SEQ ID NO: 2054. In some embodiments, a masking moiety comprising SEQ ID NO: 99 is combined with a substrate comprising SEQ ID NO: 1100 and a VL region comprising SEQ ID NO: 47 in combination with a human kappa constant domain comprising SEQ ID NO: 61 to produce a light chain comprising SEQ ID NO: 2057. In some embodiments, spacer QGQSGQG (SEQ ID NO: 362) is added to the N-terminus of SEQ ID NO: 2057 to form SEQ ID NO: 2056. In some embodiments, a masking moiety comprising SEQ ID NO: 99 is combined with a substrate comprising SEQ ID NO: 1101, and a VL region comprising SEQ ID NO: 47 in combination with a human kappa constant domain comprising SEQ ID NO: 61 to produce a light chain comprising SEQ ID NO: 2059. In some embodiments, spacer QGQSGQG (SEQ ID NO: 362) is added to the N-terminus of SEQ ID NO: 2059 to form SEQ ID NO: 2058. In some embodiments, a VH region comprising SEQ ID NO: 21 can be combined with an IgG4 S228P human immunoglobulin heavy chain constant domain comprising SEQ ID NO: 63 to produce a heavy chain comprising SEQ ID NO: 2052. In some embodiments, the C-terminal lysine of SEQ ID NO: 2052 is missing to form an amino acid sequence having SEQ ID NO: 2053. Co-expression of any one of these light chains with any one of these heavy chains will lead to production of an activatable antibody of the embodiments.

[0857] Constant region amino acid sequences are shown below in SEQ ID NO: 381, 382, 383, and 1807.

IgG1 Hc CH1-end amino acid sequence:

(SEQ ID NO: 381)
ASTKGPSVFPLAPSSKSTSGGTAALGCLVKDYFPEPVTVSWNSGALTSGVHTFPAVLQSSGLYS
LSSVVTVPSSSLGTQTYICNVNHKPSNTKVDKKVEPKSCDKTHTCPPCPAPELLGGPSVFLFPP

[chemical structure]

HQDWLNGKEYKCKVSNKALPAPIEKTISKAKGQPREPQVYTLPPSREEMTKNQVSLTCLVKGFY
PSDIAVEWESNGQPENNYKTTPPVLDSDGSFFLYSKLTVDKSRWQQGNVFSCSVMHEALHNHYT
QKSLSLSPG

IgG1NA CH1-end amino acid sequence:

(SEQ ID NO: 382)
ASTKGPSVFPLAPSSKSTSGGTAALGCLVKDYFPEPVTVSWNSGALTSGVHTFPAVLQSSGLYS
LSSVVTVPSSSLGTQTYICNVNHKPSNTKVDKKVEPKSCDKTHTCPPCPAPELLGGPSVFLFPP

[chemical structure]

HQDWLNGKEYKCKVSNKALPAPIEKTISKAKGQPREPQVYTLPPSREEMTKNQVSLTCLVKGFY
PSDIAVEWESNGQPENNYKTTPPVLDSDGSFFLYSKLTVDKSRWQQGNVFSCSVMHEALHNHYT
QKSLSLSPG

IgG1NQ CH1-end amino acid sequence:

(SEQ ID NO: 1807)
ASTKGPSVFPLAPSSKSTSGGTAALGCLVKDYFPEPVTVSWNSGALTSGVHTFPAVLQSSGLYS
LSSVVTVPSSSLGTQTYICNVNHKPSNTKVDKKVEPKSCDKTHTCPPCPAPELLGGPSVFLFPP

[chemical structure]

HQDWLNGKEYKCKVSNKALPAPIEKTISKAKGQPREPQVYTLPPSREEMTKNQVSLTCLVKGFY
PSDIAVEWESNGQPENNYKTTPPVLDSDGSFFLYSKLTVDKSRWQQGNVFSCSVMHEALHNHYT
QKSLSLSPG

IgG4 Hc CH1-end amino acid sequence:

(SEQ ID NO: 383)
ASTKGPSVFPLAPCSRSTSESTAALGCLVKDYFPEPVTVSWNSGALTSGVHTFPAVLQSSGLYS

[chemical structure]

DTLMISRTPEVTCVVVDVSQEDPEVQFNWYVDGVEVHNAKTKPREEQFNSTYRVVSVLTVLHQD
WLNGKEYKCKVSNKGLPSSIEKTISKAKGQPREPQVYTLPPSQEEMTKNQVSLTCLVKGFYPSD
IAVEWESNGQPENNYKTTPPVLDSDGSFFLYSRLTVDKSRWQEGNVFSCSVMHEALHNHYTQKS
LSLSLG

Light Chain (Lc) amino acid sequence:

(SEQ ID NO: 380)

AMSGCSWSAFCPYLA[X1]LSGRSDNH[X2]DIQLTQSPSSLSASVGDRV
TITCRASESVDNYGISFMNWFQQKPGKAPKLLIYAASNQGSGVPSRFSGS
GSGTDFTLTISSMQPEDFATYYCQQSKDVPWTFGQGTKLEIKRTVAAPSV
FIFPPSDEQLKSGTASVVCLLNNFYPREAKVQWKVDNALQSGNSQESVTE
QDSKDSTYSLSSTLTLSKADYEKHKVYACEVTHQGLSSPVTKSFNRGEC

[0858] where each of X1 and X2 independently can be a linking peptide or absent.

IgG4 S228P Heavy Chain (Hc) amino acid sequence:

(SEQ ID NO: 2047)

EVQLVESGGGLVQPGGSLRLSCAASGFTFSGYAMSWVRQAPGKGLEWVAY
ISNSGGNAHYADSVKGRFTISRDNSKNTLYLQMNSLRAEDTAVYYCTRED
YGTSPFVYWGQGTLVTVSSASTKGPSVFPLAPCSRSTSESTAALGCLVKD
YFPEPVTVSWNSGALTSGVHTFPAVLQSSGLYSLSSVVTVPSSSLGTKTY
TCNVDHKPSNTKVDKRVESKYGPPCPPCPAPEFLGGPSVFLFPPKPKDTL
MISRTPEVTCVVVDVSQEDPEVQFNWYVDGVEVHNAKTKPREEQFNSTYR
VVSVLTVLHQDWLNGKEYKCKVSNKGLPSSIEKTISKAKGQPREPQVYTL
PPSQEEMTKNQVSLTCLVKGFYPSDIAVEWESNGQPENNYKTTPPVLDSD
GSFFLYSRLTVDKSRWQEGNVFSCSVMHEALHNHYTQKSLSLSLGK

IgG1 Heavy Chain (Hc) amino acid sequence:

(SEQ ID NO: 2048)
EVQLVESGGGLVQPGGSLRLSCAASGFTFSGYAMSWVRQAPGKGLEWVAYISNSGGNAHYADSV
KGRFTISRDNSKNTLYLQMNSLRAEDTAVYYCTREDYGTSPFVYWGQGTLVTVSS
ASTKGPSVFPLAPSSKSTSGGTAALGCLVKDYFPEPVTVSWNSGALTSGVHTFPAVLQSSGLYS
LSSVVTVPSSSLGTQTYICNVNHKPSNTKVDKKVEPKSCDKTHTCPPCPAPELLGGPSVFLFPP

[chemical structure]

HQDWLNGKEYKCKVSNKALPAPIEKTISKAKGQPREPQVYTLPPSREEMTKNQVSLTCLVKGFY
PSDIAVEWESNGQPENNYKTTPPVLDSDGSFFLYSKLTVDKSRWQQGNVFSCSVMHEALHNHYT
QKSLSLSPG

IgG1NA He amino acid sequence:

(SEQ ID NO: 2049)
EVQLVESGGGLVQPGGSLRLSCAASGFTFSGYAMSWVRQAPGKGLEWVAYISNSGGNAHYADSV
KGRFTISRDNSKNTLYLQMNSLRAEDTAVYYCTREDYGTSPFVYWGQGTLVTVSS
ASTKGPSVFPLAPSSKSTSGGTAALGCLVKDYFPEPVTVSWNSGALTSGVHTFPAVLQSSGLYS
LSSVVTVPSSSLGTQTYICNVNHKPSNTKVDKKVEPKSCDKTHTCPPCPAPELLGGPSVFLFPP

[chemical structure]

HQDWLNGKEYKCKVSNKALPAPIEKTISKAKGQPREPQVYTLPPSREEMTKNQVSLTCLVKGFY
PSDIAVEWESNGQPENNYKTTPPVLDSDGSFFLYSKLTVDKSRWQQGNVFSCSVMHEALHNHYT
QKSLSLSPG

IgG1NQ He amino acid sequence:

(SEQ ID NO: 2050)
EVQLVESGGGLVQPGGSLRLSCAASGFTFSGYAMSWVRQAPGKGLEWVAYISNSGGNAHYADSV
KGRFTISRDNSKNTLYLQMNSLRAEDTAVYYCTREDYGTSPFVYWGQGTLVTVSS
ASTKGPSVFPLAPSSKSTSGGTAALGCLVKDYFPEPVTVSWNSGALTSGVHTFAVLQSSGLYS
LSSVVTVPSSSLGTQTYICNVNHKPSNTKVDKKVEPKSCDKTHTCPPCAPAPELLGGPSVFLFPP

[chemical structure]

HQDWLNGKEYKCKVSNKALPAPIEKTISKAKGQPREPQVYTLPPSREEMTKNQVSLTCLVKGFY
PSDIAVEWESNGQPENNYKTTPPVLDSDGSFFLYSKLTVDKSRWQQGNVFSCSVMHEALHNHYT
QKSLSLSPG

IgG4 Hc amino acid sequence:

(SEQ ID NO: 2051)
EVQLVESGGGLVQPGGSLRLSCAASGFTFSGYAMSWVRQAPGKGLEWVAYISNSGGNAHYADSV
KGRFTISRDNSKNTLYLQMNSLRAEDTAVYYCTREDYGTSPFVYWGQGTLVTVSS
ASTKGPSVFPLAPCSRSTSESTAALGCLVKDYFPEPVTVSWNSGALTSGVHTFPAVLQSSGLYS

[chemical structure]

DTLMISRTPEVTCVVVDVSQEDPEVQFNWYVDGVEVHNAKTKPREEQFNSTYRVVSVLTVLHQD
WLNGKEYKCKVSNKGLPSSIEKTISKAKGQPREPQVYTLPPSQEEMTKNQVSLTCLVKGFYPDS
IAVEWESNGQPENNYKTTPPVLDSDGSFFLYSRLTVDKSRWQEGNVFSCSVMHEALHNHYTQKS
LSLSLG

### Heavy Chain 1 Amino Acid Sequence (SEQ ID NO: 2052):

EVQLVESGGGLVQPGGSLRLSCAASGFTFSGYAMSWVRQAPGKGLEWVAY
ISNSGGNAHYADSVKGRFTISRDNSKNTLYLQMNSLRAEDTAVYYCTRED
YGTSPFVYWGQGTLVTVSSASTKGPSVFPLAPCSRSTSESTAALGCLVKD
YFPEPVTVSWNSGALTSGVHTFPAVLQSSGLYSLSSVVTVPSSSLGTKTY
TCNVDHKPSNTKVDKRVESKYGPPCPPCPAPEFLGGPSVFLFPPKPKDTL
MISRTPEVTCVVVDVSQEDPEVQFNWYVDGVEVHNAKTKPREEQFNSTYR
VVSVLTVLHQDWLNGKEYKCKVSNKGLPSSIEKTISKAKGQPREPQVYTL
PPSQEEMTKNQVSLTCLVKGFYPSDIAVEWESNGQPENNYKTTPPVLDSD
GSFFLYSRLTVDKSRWQEGNVFSCSVMHEALHNHYTQKSLSLSLGK

### Heavy Chain 2 Amino Acid Sequence (SEQ ID NO: 2053):

EVQLVESGGGLVQPGGSLRLSCAASGFTFSGYAMSWVRQAPGKGLEWVAY
ISNSGGNAHYADSVKGRFTISRDNSKNTLYLQMNSLRAEDTAVYYCTRED
YGTSPFVYWGQGTLVTVSSASTKGPSVFPLAPCSRSTSESTAALGCLVKD
YFPEPVTVSWNSGALTSGVHTFPAVLQSSGLYSLSSVVTVPSSSLGTKTY
TCNVDHKPSNTKVDKRVESKYGPPCPPCPAPEFLGGPSVFLFPPKPKDTL
MISRTPEVTCVVVDVSQEDPEVQFNWYVDGVEVHNAKTKPREEQFNSTYR
VVSVLTVLHQDWLNGKEYKCKVSNKGLPSSIEKTISKAKGQPREPQVYTL
PPSQEEMTKNQVSLTCLVKGFYPSDIAVEWESNGQPENNYKTTPPVLDSD
GSFFLYSRLTVDKSRWQEGNVFSCSVMHEALHNHYTQKSLSLSLG

Light Chain 1 Amino Acid Sequence with spacer (SEQ ID NO: 2054):

[QGQSGQG][TSYCSIEHYPCNTHHGGGSSGGSISSGLLSGRSDNHGG
GSDIQLTQSPSSLSASVGDRVTITCRASESVDAYGISFMNWFQQKPGKAP
KLLIYAASNQGSGVPSRFSGSGSGTDFTLTISSMQPEDFATYYCQQSKDV
PWTFGQGTKLEIKRTVAAPSVFIFPPSDEQLKSGTASVVCLLNNFYPREA
KVQWKVDNALQSGNSQESVTEQDSKDSTYSLSSTLTLSKADYEKHKVY
ACEVTHQGLSSPVTKSFNRGEC]

Light Chain 1 Amino Acid Sequence without spacer (SEQ ID NO: 2055):

TSYCSIEHYPCNTHHGGGSSGGSISSGLLSGRSDNHGGGSDIQLTQSPSS
LSASVGDRVTITCRASESVDAYGISFMNWFQQKPGKAPKLLIYAASNQGS
GVPSRFSGSGSGTDFTLTISSMQPEDFATYYCQQSKDVPWTFGQGTKLEI
KRTVAAPSVFIFPPSDEQLKSGTASVVCLLNNFYPREAKVQWKVDNALQS
GNSQESVTEQDSKDSTYSLSSTLTLSKADYEKHKVYACEVTHQGLSSPVT
KSFNRGEC

Light Chain 2 Amino Acid Sequence with spacer (SEQ ID NO: 2056):

[QGQSGQG][TSYCSIEHYPCNTHHGGGSSGGSISSGLLSGRSDNPGG
GSDIQLTQSPSSLSASVGDRVTITCRASESVDAYGISFMNWFQQKPGKAP
KLLIYAASNQGSGVPSRFSGSGSGTDFTLTISSMQPEDFATYYCQQSKDV
PWTFGQGTKLEIKRTVAAPSVFIFPPSDEQLKSGTASVVCLLNNFYPREA
KVQWKVDNALQSGNSQESVTEQDSKDSTYSLSSTLTLSKADYEKHKVY
ACEVTHQGLSSPVTKSFNRGEC]

Light Chain 2 Amino Acid Sequence with spacer (SEQ ID NO: 2057):

TSYCSIEHYPCNTHHGGGSSGGSISSGLLSGRSDNPGGGSDIQLTQSPSS
LSASVGDRVTITCRASESVDAYGISFMNWFQQKPGKAPKLLIYAASNQGS
GVPSRFSGSGSGTDFTLTISSMQPEDFATYYCQQSKDVPWTFGQGTKLEI
KRTVAAPSVFIFPPSDEQLKSGTASVVCLLNNFYPREAKVQWKVDNALQS
GNSQESVTEQDSKDSTYSLSSTLTLSKADYEKHKVYACEVTHQGLSSPVT
KSFNRGEC

Light Chain 3 Amino Acid Sequence with spacer (SEQ ID NO: 2058):

[QGQSGQG][TSYCSIEHYPCNTHHGGGSSGGSISSGLLSGRSANPG
GGSDIQLTQSPSSLSASVGDRVTITCRASESVDAYGISFMNWFQQKPGKA
PKLLIYAASNQGSGVPSRFSGSGSGTDFTLTISSMQPEDFATYYCQQSKD
VPWTFGQGTKLEIKRTVAAPSVFIFPPSDEQLKSGTASVVCLLNNFYPRE
AKVQWKVDNALQSGNSQESVTEQDSKDSTYSLSSTLTLSKADYEKHKVYA
CEVTHQGLSSPVTKSFNRGEC]

Light Chain 3 Amino Acid Sequence with spacer (SEQ ID NO: 2059):

TSYCSIEHYPCNTHHGGGSSGGSISSGLLSGRSANPGGGSDIQLTQSPSS
LSASVGDRVTITCRASESVDAYGISFMNWFQQKPGKAPKLLIYAASNQGS
GVPSRFSGSGSGTDFTLTISSMQPEDFATYYCQQSKDVPWTFGQGTKLEI
KRTVAAPSVFIFPPSDEQLKSGTASVVCLLNNFYPREAKVQWKVDNALQS
GNSQESVTEQDSKDSTYSLSSTLTLSKADYEKHKVYACEVTHQGLSSPVT
KSFNRGEC

### Example 10

### Evaluation of Efficiency of Masking Moieties

[0861] This example describes activatable anti-PD-1 antibodies of the disclosure with reduced binding to hPD-1.

[0862] Masking the ability of an antibody to bind to its antigen is an example of inhibition of binding. The extent of inhibition is dependent on the affinity of the antibody for its antigen, the affinity of the masking moiety (also referred to herein as the mask) for the antibody and the concentration of all reactants. Local concentrations of the tethered peptide mask (inhibitor) is very high in the activatable antibody context, on the order of 10 mM, therefore moderate affinity peptides would effectively mask activatable antibody antigen binding.

[0863] Masking efficiencies were evaluated by standard plate ELISA. Briefly, human PD-1-Fc (Rand D systems, Minneapolis, Minn.) was adsorbed to the wells of a 96-well ELISA plate. Purified anti-PD-1 antibodies and activatable antibodies were applied to the plate in serial dilution and allowed to bind. Bound antibody and activatable antibodies were detected with anti-human IgG-HRP conjugate, FAb-specific (Sigma, St Louis, Mo.) and visualized with the chromogenic substrate TMB (Thermo Scientific, Rockford, Ill.). Shown are plots of binding isotherms for anti-PD-1 A1.4 and anti-PD-1 A1.5 activatable antibodies (FIGS. 14-18). Plots were generated in Prizm (Sigma Plot); the data were fit to a model of single site saturation binding, and the equilibrium dissociation constant, K_{d}, was determined. Masking efficiency was calculated by dividing the K_{d} for binding of the activatable antibodies by the K_{d} of the parental antibody. The masking efficiency (ME) values for the tested antibodies are shown in Table 14 and Table 15 below (masking moiety PD001 is also referred to herein as PD01 and/or PD-01; masking moiety PD002 is also referred to herein as PD02 and/or PD-02, and so on), and the apparent Kd (nM) and masking efficiency (ME) values for the tested activatable antibodies are shown in Table 26:

TABLE 14
Masking efficiency values for activatable
antibodies tested in FIG. 14

| Mask | ME |
|---|---|
| PD01 | 25 |
| PD02 | 18 |
| PD03 | 5 |
| PD08 | 13 |
| PD09 | 2 |
| PD-10 | 13 |

TABLE 15
Masking efficiency values for activatable antibodies tested in FIG. 18

| Mask | ME |
|---|---|
| None | 1 |
| PD06 | 30 |
| PD09 | 2 |
| PD-12 | 10 |
| PD-17 | 20 |
| PD-19 | 30 |
| PD25 | 30 |
| PD26 | 20 |
| PD28 | 25 |
| PD34 | 42 |

TABLE 26
Apparent Kd and Masking efficiency values for activatable
antibodies tested in FIG. 15

| Molecule | Apparent KD, nM | Masking Efficiency |
|---|---|---|
| A1.5 (n = 5 avg) | 1.8 | |
| PD01 | 348 | 193 |
| PD02 | 21 | 12 |
| PD03 | 109 | 61 |
| PD05 | 68 | 38 |
| PD06 | 71 | 39 |
| PD08 | 55 | 31 |
| PD09 | 10 | 6 |
| PD10 | 54 | 30 |
| PD11 | 67 | 37 |
| PD12 | 25 | 14 |
| PD13 | 151 | 84 |
| PD14 | 100 | 56 |
| PD15 | 117 | 65 |
| PD16 | 57 | 32 |
| PD17 | 22 | 12 |
| PD18 | 75 | 42 |
| PD19 | 93 | 52 |
| PD20 | 77 | 43 |
| PD21 | 49 | 27 |
| PD22 | 41 | 23 |
| PD23 | 31 | 17 |
| PD24 | 92 | 51 |

### Example 11

### Anti-PD-1 Activatable Antibodies of the Embodiments are Functionally Masked in a Human T-Cell Restimulation Assay

[0864] This example describes the effect of masking moieties on the biological function of the anti-PD-1 antibody. (FIG. 19)

[0865] PBMCs from a CMV-positive donor (Hemacare) were plated at 2×10⁵ cells/well in the presence of CMV viral lysate (Astarte) and either anti-PD-1 antibody A1.5, an anti-PD-1 activatable antibody of the disclosure, or hIgG4 isotype control antibody. After four days, supernatant was removed from each well and IFN-gamma levels were assayed using IFN-gamma ELISA kit (Life Technologies, Carlsbad, Calif.). Anti-PD-1 A1.5 activatable antibodies increased CMV-stimulated IFN-gamma secretion compared with control hIgG4 but with decreased potency relative to anti-PD-1 A1.5 parental antibody (FIG. 19).

### Example 12

### Anti Mouse PD-1 J43v2 mIgG2a Antibody Binds Mouse PD-1 and Blocks Mouse PD-L1 and Mouse PD-L2 Binding

[0866] This example demonstrates that Armenian hamster anti mouse PD-1 J43 antibody (U.S. Pat. No. 7,858,746; Agata et al, 1996, International Immunology, Vol. 8 No. 5 pp 765-77) can be functionally expressed as a mouse IgG2a antibody.

[0867] Anti-mouse PD-1 antibody J43 was reformatted as a hamster LC (SEQ ID NO: 543 amino acid; SEQ ID NO: 544 or SEQ ID NO: 545 nucleotide), mouse IgG2a antibody by fusion of the heavy chain variable domain to mIgG2a, resulting in amino acid SEQ ID NO 546, nucleotide sequence SEQ ID NO 547. Full length J43v2 mIgG2a (also referred to as J43v2, J43 m2a and J43v2 m2a) was expressed by transient transfection of HEK293 cells and purified from the culture supernatant by Protein G chromatography. One embodiment of this disclosure is an antibody comprising a light chain comprising amino acid sequence SEQ ID NO: 543. One embodiment of this disclosure is an antibody comprising a heavy chain comprising amino acid sequence SEQ ID NO: 546. One embodiment of this disclosure is an antibody comprising a light chain comprising amino acid sequence SEQ ID NO: 543 and a heavy chain comprising amino acid sequence SEQ ID NO: 546. One embodiment of this disclosure is an antibody comprising the CDRs of an antibody comprising a light chain comprising amino acid sequence SEQ ID NO: 543 and a heavy chain comprising amino acid sequence SEQ ID NO: 546.

[0868] Functionality was assayed by binding of J43v2 m2a to HEK293 cells expressing mouse PD-1 and confirmation that binding of J43v2 m2a to HEK293-mPD-1 inhibited binding of biotinylated mPD-L1 and biotinylated mPD-L2 to HEK293-mPD-1 (FIG. 20). About 100,000 mPD-1 HEK293 cells were transferred to a U-bottom 96-well plate. For the binding experiment, a 1:4 titration of J43v2 m2a antibody starting at 150 nM was added to cells. For blocking experiments, 20 nM of biotinylated-mPD-L1-Fc or 20 nM of biotinylated-mPD-L2-Fc were premixed with a 1:4 titration of J43v2 m2a starting at 150 nM and added to cells. Both were incubated for 1 hour on ice and cells were washed 3 times. J43v2 m2a antibody binding was detected using an anti-mouse secondary antibody (Jackson Immunoresearch, West Grove, Pa.). For the blocking experiment, biotinylated-PD-L1 or biotinylated-PD-L2 was detected using streptavidin-PE (Life Technologies, Carlsbad, Calif.). Both binding and blocking were incubated for 30 minutes on ice and were washed and read on a flow cytometer (MACSQuant).

### Example 13

### J43v2 m2a Induces Diabetes in NOD Mouse Model

[0869] In this Example, anti-PD-1 J43v2 m2a antibody was confirmed to induce diabetes in the NOD mouse model.

[0870] Antibody J43v2 m2a was confirmed to induce diabetes in NOD mice as follows. The NOD mice, substrain NOD/ShiLtJ were obtained from Jackson Laboratory at 8 weeks and acclimated on site for 2 weeks. At 10 weeks, mice were checked for diabetes prior to enrollment, grouped, and dosed as set forth in Table 16. FIG. 21 shows the dose-dependent induction of diabetes in NOD mice by J43v2 m2a. At day eight after a single dose, 100% of mice in the mIgG2a isotype control group remained non-diabetic, while 0%, 14% and 86% of the 20 mg/kg, 3 mg/kg and 1 mg/kg groups, respectively, remained non-diabetic.

TABLE 16
Study design

| | | | | | Dose | | |
|---|---|---|---|---|---|---|---|
| | | | | Dose | volume | | |
| Group | Count | Gender | Treatment | (mg/kg) | (mL/kg) | Schedule | Route |
| 1 | 7 | F | mIgG2a (C1.18.4) | 20 | 10 | q7dx1 | IP |
| 2 | 7 | F | Anti-PD-1 (J43v2) | 20 | 10 | q7dx1 | IP |
| 3 | 7 | F | Anti-PD-1 (J43v2) | 5 | 10 | q7dx1 | IP |
| 4 | 7 | F | Anti-PD-1 (J43v2) | 1 | 10 | q7dx1 | IP |

### Example 14

### Activatable Anti-Mouse PD-1 J43 Masking Moieties

[0871] This example describes identification of masking moieties (MM) that reduce binding of anti-PD-1 J43 antibody to its target.

[0872] Anti-PD-1 J43v2 mIgG2a was used to screen libraries using a method similar to that described in PCT International Publication Number WO 2010/081173, published 15 Jul. 2010. The screening consisted of one round of MACS and three rounds of FACS sorting. For the initial MACS, approximately 1×10¹² cells were incubated with J43v2 m2a antibody at a concentration of 200 nM, and approximately 9×10⁷ binders were collected using Protein-G Dynabeads (Life Technologies, Carlsbad, Calif.). FACS rounds were conducted labeling cells with DyLight 650 (Thermo-Fisher) labeled J43v2 m2a antibody and collecting cells with strongest fluorescence as follows: 200 nM J43-650 collecting brightest 3% for FACS round 1 (F1), 20 nM J43-650 collecting brightest 8% for FACS round 2 (F2) and 1 nM J43-650 collecting two populations, the brightest 20% and the brightest 0.5% for FACS round 3 (F3-20 and F3-0.5). Individual peptide clones from F2, F3-20 and F3-0.5 were identified by sequence analysis (Table 17), and selected peptide clones MP001-MP014 were subsequently verified for their ability to bind J43-650 (masking moiety MP001 is also referred to herein as MP01 and/or MP-01; masking moiety MP002 is also referred to herein as MP02 and/or MP-02, and so on).

TABLE 17
Masking moiety sequences

| Mask | Amino Acid Sequence | SEQ ID NO: |
|---|---|---|
| MP001 | DYTYCRWVNWCLSGV | 384 |
| MP002 | ILCPEDPWGHKCKLP | 385 |
| MP003 | TNIWSCQTYCDHKHK | 386 |
| MP004 | SDHKCKLQNCMNTKV | 387 |
| MP005 | PGNCHPMQKEMCQFI | 388 |
| MP006 | VEHLCYTHNKCKHPD | 389 |
| MP007 | TIPRCGQHPKCKDTL | 390 |
| MP008 | ACRICQDHPKTKWNS | 391 |
| MP009 | LIQCTGNLDHKCKHY | 392 |
| MP010 | IPCHHSADHKHKCTS | 393 |
| MP011 | SRQICADYNCHNKYK | 394 |
| MP012 | QPCNPQIDHKIKCIY | 395 |
| MP013 | HYTICMTHNKCKDMA | 396 |
| MP014 | ANSCLAVEHKCKHNY | 397 |
| MP015 | AALHCTEHKCKNHIK | 398 |
| MP016 | APCIINTVDWKSCEI | 399 |
| MP017 | ATNWCTHKQKCKQDM | 400 |
| MP018 | DCYNEHKLKTRVCNN | 401 |
| MP019 | DEMQCSHKQKCTNSK | 402 |
| MP020 | DVGICSQHNKCKPTK | 403 |
| MP021 | EKYCSSDDHKCKITL | 404 |
| MP022 | ELECSHNKVKNCIQI | 405 |
| MP023 | ELHPCNTHKCKPIVN | 406 |
| MP024 | EVGSCNHPKCKSNNY | 407 |
| MP025 | EYSPSLAHPKLKDNA | 408 |
| MP026 | FESLHPKGKHPEDLG | 409 |
| MP027 | FPLCVRADRVCGDAQ | 410 |
| MP028 | FQAPPASHNKLKPSL | 411 |
| MP029 | GAIDSCHHKCKSPHY | 412 |
| MP030 | GKIYTCEHNCTFGYS | 413 |
| MP031 | HCTVNNHSSDHKCKI | 414 |
| MP032 | HGTQCTHNKCKPILS | 415 |
| MP033 | HIGWCLHPKCKTTTT | 416 |
| MP034 | HLRTCIQKWCEHKMK | 417 |
| MP035 | HTDCTMMSNHKCKIN | 418 |
| MP036 | IRQQCTALACLLKVH | 419 |
| MP037 | KGCSTHKMRAYCNQM | 420 |
| MP038 | KMFTPCKIWCNNSYN | 421 |
| MP039 | KTMCSGHKQKCNNSS | 422 |
| MP040 | LACHSASLVDHKCKL | 423 |
| MP041 | LCNVSMDHKHKPCYL | 424 |
| MP042 | LGLNCFSEHKCKEHM | 425 |
| MP043 | LGTCTHKHKNCNYTL | 426 |
| MP044 | LHEGCTTHNKCKPIA | 427 |
| MP045 | LKRSCTGHWTCYTNW | 428 |
| MP046 | LQRCTHKEKYCHAIH | 429 |
| MP047 | LSHCYDHKRKCSYIV | 430 |
| MP048 | LSKCHNKEKNCSNNN | 431 |
| MP049 | MDTCEMHKQKCRPSF | 432 |
| MP050 | MHNECLTHKCKVPIT | 433 |
| MP051 | MLTLCNTNACHKEKN | 434 |
| MP052 | MRPCLNNLEHKCKHY | 435 |
| MP053 | MSRCPTHKMKCSLNI | 436 |
| MP054 | MWICQEHKLKCMTDT | 437 |
| MP055 | MYYCKRRSAFYCTLN | 438 |
| MP056 | NDCQHDKQMHKCKMH | 439 |
| MP057 | NFGPCPMLLGCFGFR | 440 |
| MP058 | NHTDCSHPKCKSHDS | 441 |
| MP059 | NLNCPHKQKNCDKYH | 442 |
| MP060 | NPQCTPIDHKCKTHH | 443 |
| MP061 | NTTSCTHPKCKHQGK | 444 |
| MP062 | NVGGCDNYGCHKLKN | 445 |
| MP063 | PCSPGNLTWDHKCKY | 446 |
| MP064 | PFTKCHGFNKCKEHT | 447 |
| MP065 | PGDKCTHKEKCYYNN | 448 |
| MP066 | PNICNLDHKRKCRIN | 449 |
| MP067 | PQLACKHPKCKDAGN | 450 |
| MP068 | PSCTMWTHGGVCKHA | 451 |
| MP069 | PSHRHPLAKPGFRVE | 452 |
| MP070 | PTCFKTHNKSKCNRV | 453 |
| MP071 | PTPVCHHNFHCFGYD | 454 |
| MP072 | QATCQWKKRSKCHNK | 455 |
| MP073 | QHSWCQHKAKCNYGN | 456 |
| MP074 | QNCSPTYTTHKCKLT | 457 |
| MP075 | QSSNCEHKRKCSSIS | 458 |
| MP076 | RPCLLGLVPDHKCKL | 459 |
| MP077 | RRSCMRSINTCKQKY | 460 |
| MP078 | RSSCPTVTPQNCENQ | 461 |
| MP079 | RTMCLDLNHKCKPSN | 462 |
| MP080 | RTYWCTNHNKCKHNM | 463 |
| MP081 | RVENCEHNQYCHKWK | 464 |
| MP082 | SCHEDDHKNKNICSL | 465 |
| MP083 | SDTCVMNHPKCKRDN | 466 |
| MP084 | SSTCFHPNQKECMTK | 467 |
| MP085 | SSYCGGITMRCRRAM | 468 |
| MP086 | STGYCTYVNWCNYTN | 469 |
| MP087 | THKCKLHLQVCTQTT | 470 |
| MP088 | TMNCTHPKQKCQHTN | 471 |
| MP089 | TNVLCESHNCDHKNK | 472 |
| MP090 | TQHAASLGVEHKSKI | 473 |
| MP091 | TQLPCFDDHKCKNTN | 474 |
| MP092 | TSDSCMRQKCEHKEK | 475 |
| MP093 | TTCDDHKYKHKCAQL | 476 |
| MP094 | TTCGAHKEKQHCIYT | 477 |
| MP095 | TTYCAYWHNKCKFET | 478 |
| MP096 | VGPTCGHAKCKQSEV | 479 |
| MP097 | VSHPCNTHKCKTNIV | 480 |
| MP098 | WDCRNTSHPKLKCHN | 481 |
| MP099 | WSPCNSDHKRKCNNG | 482 |
| MP100 | YANMSCEYDCHKMKY | 483 |
| MP101 | YANPCTHKEKCHFKN | 484 |
| MP102 | YDCSPSWTHPKCKHK | 485 |
| MP103 | YGWTCTTHPKCKTTN | 486 |
| MP104 | YQKCHPKAKDCGNNT | 487 |
| MP105 | YWECPNMEHNKCKNN | 488 |
| MP106 | PMGNRYCVLDHPKLK | 489 |
| MP107 | GHKSCCQKHCEYTQT | 490 |
| MP108 | LYLEMCSCCCWESIT | 491 |
| MP109 | ACQAQHCYKTYACKP | 492 |
| MP110 | CCYTCSVHPKCKNQL | 493 |
| MP111 | CKHRCSHKEKCPANH | 494 |
| MP112 | CHVLFCLMQCCRWSL | 495 |
| MP113 | LNSSLVFDHPKAKPN | 496 |
| MP114 | MCLLCRSKFGCKVKG | 497 |
| MP115 | IICNDHKCKQNQCNN | 498 |
| MP116 | IRCSLRDSLCGCERM | 499 |
| MP117 | TSCQPPKHKCTCNHG | 500 |
| MP118 | TQCPHRCVKPNCWLH | 501 |
| MP119 | KCCETKRNHKHCTYK | 502 |
| MP120 | LPHCCHKAKHCNHTS | 503 |
| MP121 | PAMCAAIHEKCCIKV | 504 |
| MP122 | PRSCGNQLCPCHYYK | 505 |
| MP123 | TNKCSCNHNMKCINY | 506 |
| MP124 | VETCCQHNKCKYPFI | 507 |
| MP125 | IFCCSNHEDHKCKTN | 508 |
| MP126 | VCRLICPLTCVIGVG | 509 |
| MP127 | FHGCCSVYSCLTNPG | 510 |
| MP128 | ALACHPKQKPLEGQL | 511 |
| MP129 | SIICCATSSCPLKHL | 512 |
| MP130 | APCCRPHKEKPIDSR | 513 |
| MP131 | WELCCPSADCRVAMG | 514 |

### Example 15

### Characterization of Activatable Anti-Mouse PD-1 Antibodies

[0873] This example describes activatable anti-PD-1 antibodies of the disclosure with reduced binding to hPD-1 compared to binding by parental antibody.

[0874] Masking efficiencies were evaluated by standard plate ELISA. Briefly, mouse PD-1-Fc (Rand D systems, Minneapolis, Minn.) was adsorbed to the wells of a 96-well ELISA plate. Purified J43v2 and activatable J43v2 antibodies comprising the indicated masks, cleavable moiety 2001, and antibody J43v2 were applied to the plate in serial dilution and allowed to bind. Bound antibody and activatable antibodies were detected with anti-mouse IgG-HRP conjugate (Sigma, St Louis, Mo.) and visualized with the chromogenic substrate TMB (Thermo Scientific, Rockford, Ill.). Plots were generated in Prizm (Sigma Plot). All activatable J43 antibodies showed strongly decreased binding compared with the parental J43 (FIG. 22).

[0875] In some embodiments, the activatable antibody also includes a spacer sequence. In some embodiments, the spacer is joined directly to the MM of the activatable antibody. In some embodiments, the spacer is joined directly to the MM of the activatable antibody in the structural arrangement from N-terminus to C-terminus of spacer-MM-CM-AB. In some embodiments, the spacer joined directly to the N-terminus of MM of the activatable antibody is selected from the group consisting of QGQSGQG (SEQ ID NO: 362), QGQSGQ (SEQ ID NO: 913), QGQSG (SEQ ID NO: 914), QGQS (SEQ ID NO: 915), QGQ (SEQ ID NO: 916), QG (SEQ ID NO: 917), and Q. In some embodiments, the spacer includes at least the amino acid sequence QGQSGQG (SEQ ID NO: 362). In some embodiments, the spacer includes at least the amino acid sequence QGQSGQ (SEQ ID NO: 913). In some embodiments, the spacer includes at least the amino acid sequence QGQSG (SEQ ID NO: 914). In some embodiments, the spacer includes at least the amino acid sequence QGQS (SEQ ID NO: 915), In some embodiments, the spacer includes at least the amino acid sequence QGQ (SEQ ID NO: 916). In some embodiments, the spacer includes at least the amino acid sequence QG (SEQ ID NO: 917). In some embodiments, the spacer includes at least the amino acid residue Q. In some embodiments, the activatable antibody does not include a spacer sequence.

[0876] Additional examples of spacers include GQSGQG (SEQ ID NO: 2042), QSGQG (SEQ ID NO: 2043), SGQG (SEQ ID NO: 2044), GQG (SEQ ID NO: 2045), QG (SEQ ID NO: 2046), and G.

[0877] While the sequences shown below include the spacer sequence of SEQ ID NO: 362, those of ordinary skill in the art appreciate that the activatable anti-PD-1 antibodies of the disclosure can include any suitable spacer sequence, such as, for example, a spacer sequence selected from the group consisting of QGQSGQG (SEQ ID NO: 362), QGQSGQ (SEQ ID NO: 913), QGQSG (SEQ ID NO: 914), QGQS (SEQ ID NO: 915), QGQ (SEQ ID NO: 916), QG (SEQ ID NO: 917), and Q. Additional examples of spacers include GQSGQG (SEQ ID NO: 2042), QSGQG (SEQ ID NO: 2043), SGQG (SEQ ID NO: 2044), GQG (SEQ ID NO: 2045), QG (SEQ ID NO: 2046), and G. While the sequences shown below include the spacer sequence of SEQ ID NO: 362, those of ordinary skill in the art will also appreciate that activatable anti-PD-1 antibodies of the disclosure in some embodiments do not include a spacer sequence.

### Activatable Anti-Mouse PD-1 Light Chain Variable Domains

[0878] [spacer (SEQ ID NO: 362)] [J43 MP001 2001 (SEQ ID NO: 999)] amino acid sequence:

(SEQ ID NO: 515)

[QGQSGQG][DYTYCRWVNWCLSGVGGGSSGGSISSGLLSGRSDNHGG
GSYELTQPPSASVNVGETVKITCSGDQLPKYFADWFHQRSDQTILQVIYD
DNKRPSGIPERISGSSSGTTATLTIRDVRAEDEGDYYCFSGYVDSDSKLY
VFGSGTQLTVL]

J43 MP001 2001 amino acid sequence:

(SEQ ID NO: 1077)

DYTYCRWVNWCLSGVGGGSSGGSISSGLLSGRSDNHGGGSYELTQPPSAS
VNVGETVKITCSGDQLPKYFADWFHQRSDQTILQVIYDDNKRPSGIPERI
SGSSSGTTATLTIRDVRAEDEGDYYCFSGYVDSDSKLYVFGSGTQLTVL

[spacer (SEQ ID NO: 918)] [J43 MP001 2001 (SEQ ID NO: 1000)] nucleic acid sequence:

(SEQ ID NO: 516)

[CAAGGCCAGTCTGGCCAAGGT][GATTATACGTATTGCCGTTGGGTTA
ATTGGTGCTTGTCTGGGGTGGGAGGTGGCTCGAGCGGCGGCTCTATCTCT
TCCGGACTGCTGTCCGGCAGATCCGACAATCACGGCGGAGGCTCTTATGA
GCTGACTCAGCCACCTTCAGCATCAGTCAATGTAGGAGAGACTGTCAAAA
TCACCTGCTCTGGGGACCAATTGCCGAAATATTTTGCAGATTGGTTTCAT
CAAAGGTCAGACCAGACCATTTTGCAAGTGATATATGATGATAATAAGCG
CCCCTCGGGTATCCCTGAAAGAATCTCTGGGTCCAGCTCAGGGACAACAG
CCACCTTGACCATCAGAGATGTCCGGGCTGAGGATGAAGGTGACTATTAC
TGTTTCTCAGGATATGTTGATAGTGATAGCAAATTGTATGTTTTTGGCAG
CGGAACCCAGCTCACCGTCCT

[spacer (SEQ ID NO: 362)] [J43 MP002 2001 (SEQ ID NO: 1001)] amino acid sequence:

(SEQ ID NO: 517)

[QGQSGQG][ILCPEDPWGHKCKLPGGGSSGGSISSGLLSGRSDNHGGG
SYELTQPPSASVNVGETVKITCSGDQLPKYFADWFHQRSDQTILQVIYDD
NKRPSGIPERISGSSSGTTATLTIRDVRAEDEGDYYCFSGYVDSDSKLYV
FGSGTQLTVL]

J43 MP002 2001 amino acid sequence:

(SEQ ID NO: 1078)

ILCPEDPWGHKCKLPGGGSSGGSISSGLLSGRSDNHGGGSYELTQPPSAS
VNVGETVKITCSGDQLPKYFADWFHQRSDQTILQVIYDDNKRPSGIPERI
SGSSSGTTATLTIRDVRAEDEGDYYCFSGYVDSDSKLYVFGSGTQLTVL

[spacer (SEQ ID NO: 918)] [J43 MP002 2001 (SEQ ID NO: 1002)] nucleic acid sequence:

(SEQ ID NO: 518)

[CAAGGCCAGTCTGGCCAAGGT][ATTCTGTGCCCGGAGGATCCGTGGG
GGCATAAGTGCAAGCTGCCTGGAGGTGGCTCGAGCGGCGGCTCTATCTCT
TCCGGACTGCTGTCCGGCAGATCCGACAATCACGGCGGAGGCTCTTATGA
GCTGACTCAGCCACCTTCAGCATCAGTCAATGTAGGAGAGACTGTCAAAA
TCACCTGCTCTGGGGACCAATTGCCGAAATATTTTGCAGATTGGTTTCAT
CAAAGGTCAGACCAGACCATTTTGCAAGTGATATATGATGATAATAAGCG
CCCCTCGGGTATCCCTGAAAGAATCTCTGGGTCCAGCTCAGGGACAACAG
CCACCTTGACCATCAGAGATGTCCGGGCTGAGGATGAAGGTGACTATTAC
TGTTTCTCAGGATATGTTGATAGTGATAGCAAATTGTATGTTTTTGGCAG
CGGAACCCAGCTCACCGTCCTA

[spacer (SEQ ID NO: 362)] [J43 MP003 2001 (SEQ ID NO: 1003)] amino acid sequence:

(SEQ ID NO: 519)

[QGQSGQG][TNIWSCQTYCDHKHKGGGSSGGSISSGLLSGRSDNHGGG
SYELTQPPSASVNVGETVKITCSGDQLPKYFADWFHQRSDQTILQVIYDD
NKRPSGIPERISGSSSGTTATLTIRDVRAEDEGDYYCFSGYVDSDSKLYV
FGSGTQLTVL

J43 MP003 2001 amino acid sequence:

(SEQ ID NO: 1079)

TNIWSCQTYCDHKHKGGGSSGGSISSGLLSGRSDNHGGGSYELTQPPSAS
VNVGETVKITCSGDQLPKYFADWFHQRSDQTILQVIYDDNKRPSGIPERI
SGSSSGTTATLTIRDVRAEDEGDYYCFSGYVDSDSKLYVFGSGTQLTVL

[spacer (SEQ ID NO: 918)] [J43 MP003 2001 (SEQ ID NO: 1004)] nucleic acid sequence:

(SEQ ID NO: 520)

[CAAGGCCAGTCTGGCCAAGGT][ACGAATATTTGGAGTTGCCAGACTTA
TTGCGATCATAAGCATAAGGGAGGTGGCTCGAGCGGCGGCTCTATCTCT
TCCGGACTGCTGTCCGGCAGATCCGACAATCACGGCGGAGGCTCTTATGA
GCTGACTCAGCCACCTTCAGCATCAGTCAATGTAGGAGAGACTGTCAAAA
TCACCTGCTCTGGGGACCAATTGCCGAAATATTTTGCAGATTGGTTTCAT
CAAAGGTCAGACCAGACCATTTTGCAAGTGATATATGATGATAATAAGCG
CCCCTCGGGTATCCCTGAAAGAATCTCTGGGTCCAGCTCAGGGACAACAG
CCACCTTGACCATCAGAGATGTCCGGGCTGAGGATGAAGGTGACTATTAC
TGTTTCTCAGGATATGTTGATAGTGATAGCAAATTGTATGTTTTTGGCAG
CGGAACCCAGCTCACCGTCCTA

[spacer (SEQ ID NO: 362)] [J43 MP004 2001 (SEQ ID NO: 1005)] amino acid sequence:

(SEQ ID NO: 521)

[QGQSGQG][SDHKCKLQNCMNTKVGGGSSGGSISSGLLSGRSDNHGGG
SYELTQPPSASVNVGETVKITCSGDQLPKYFADWFHQRSDQTILQVIYDD
NKRPSGIPERISGSSSGTTATLTIRDVRAEDEGDYYCFSGYVDSDSKLYV
FGSGTQLTVL]

J43 MP004 2001 amino acid sequence:

(SEQ ID NO: 1080)

SDHKCKLQNCMNTKVGGGSSGGSISSGLLSGRSDNHGGGSYELTQPPSAS
VNVGETVKITCSGDQLPKYFADWFHQRSDQTILQVIYDDNKRPSGIPERI
SGSSSGTTATLTIRDVRAEDEGDYYCFSGYVDSDSKLYVFGSGTQLTVL

[spacer (SEQ ID NO: 918)] [J43 MP004 2001 (SEQ ID NO: 1006)] nucleic acid sequence:

(SEQ ID NO: 522)

[CAAGGCCAGTCTGGCCAAGGT][AGTGATCATAAGTGCAAGCTTCAGA
ATTGCATGAATACTAAGGTTGGAGGTGGCTCGAGCGGCGGCTCTATCTCT
TCCGGACTGCTGTCCGGCAGATCCGACAATCACGGCGGAGGCTCTTATGA
GCTGACTCAGCCACCTTCAGCATCAGTCAATGTAGGAGAGACTGTCAAAA
TCACCTGCTCTGGGGACCAATTGCCGAAATATTTTGCAGATTGGTTTCAT
CAAAGGTCAGACCAGACCATTTTGCAAGTGATATATGATGATAATAAGCG
CCCCTCGGGTATCCCTGAAAGAATCTCTGGGTCCAGCTCAGGGACAACAG
CCACCTTGACCATCAGAGATGTCCGGGCTGAGGATGAAGGTGACTATTAC
TGTTTCTCAGGATATGTTGATAGTGATAGCAAATTGTATGTTTTTGGCAG
CGGAACCCAGCTCACCGTCCTA

[spacer (SEQ ID NO: 362)] [J43 MP005 2001 (SEQ ID NO: 1007)] amino acid sequence:

(SEQ ID NO: 523)

[QGQSGQG][PGNCHPMQKEMCQFIGGGSSGGSISSGLLSGRSDNHGGGS
YELTQPPSASVNVGETVKITCSGDQLPKYFADWFHQRSDQTILQVIYDDN
KRPSGIPERISGSSSGTTATLTIRDVRAEDEGDYYCFSGYVDSDSKLYVF
GSGTQLTVL]

J43 MP005 2001 amino acid sequence:

(SEQ ID NO: 1081)

PGNCHPMQKEMCQFIGGGSSGGSISSGLLSGRSDNHGGGSYELTQPPSAS
VNVGETVKITCSGDQLPKYFADWFHQRSDQTILQVIYDDNKRPSGIPERI
SGSSSGTTATLTIRDVRAEDEGDYYCFSGYVDSDSKLYVFGSGTQLTVL

[spacer (SEQ ID NO: 918)] [J43 MP005 2001 (SEQ ID NO: 1008)] nucleic acid sequence:

(SEQ ID NO: 524)

[CAAGGCCAGTCTGGCCAAGGT][CCTGGTAATTGCCATCCTATGCAGAA
GGAGATGTGCCAGTTTATTGGAGGTGGCTCGAGCGGCGGCTCTATCTCTT
CCGGACTGCTGTCCGGCAGATCCGACAATCACGGCGGAGGCTCTTATGAG
CTGACTCAGCCACCTTCAGCATCAGTCAATGTAGGAGAGACTGTCAAAAT
CACCTGCTCTGGGGACCAATTGCCGAAATATTTTGCAGATTGGTTTCATC
AAAGGTCAGACCAGACCATTTTGCAAGTGATATATGATGATAATAAGCGC
CCCTCGGGTATCCCTGAAAGAATCTCTGGGTCCAGCTCAGGGACAACAGC
CACCTTGACCATCAGAGATGTCCGGGCTGAGGATGAAGGTGACTATTACT
GTTTCTCAGGATATGTTGATAGTGATAGCAAATTGTATGTTTTTGGCAGC
GGAACCCAGCTCACCGTCCTA

[spacer (SEQ ID NO: 362)] [J43 MP006 2001 (SEQ ID NO: 1009)] amino acid sequence:

(SEQ ID NO: 525)

[QGQSGQG][VEHLCYTHNKCKHPDGGGSSGGSISSGLLSGRSDNHGGGS
YELTQPPSASVNVGETVKITCSGDQLPKYFADWFHQRSDQTILQVIYDDN
KRPSGIPERISGSSSGTTATLTIRDVRAEDEGDYYCFSGYVDSDSKLYVF
GSGTQLTVL]

J43 MP006 2001 amino acid sequence:

(SEQ ID NO: 1082)

VEHLCYTHNKCKHPDGGGSSGGSISSGLLSGRSDNHGGGSYELTQPPSAS
VNVGETVKITCSGDQLPKYFADWFHQRSDQTILQVIYDDNKRPSGIPERI
SGSSSGTTATLTIRDVRAEDEGDYYCFSGYVDSDSKLYVFGSGTQLTVL

[spacer (SEQ ID NO: 918)] [J43 MP006 2001 (SEQ ID NO: 1010)] nucleic acid sequence:

(SEQ ID NO: 526)

[CAAGGCCAGTCTGGCCAAGGT][GTTGAGCATTTGTGCTATACGCATAA
TAAGTGCAAGCATCCTGATGGAGGTGGCTCGAGCGGCGGCTCTATCTCTT
CCGGACTGCTGTCCGGCAGATCCGACAATCACGGCGGAGGCTCTTATGAG
CTGACTCAGCCACCTTCAGCATCAGTCAATGTAGGAGAGACTGTCAAAAT
CACCTGCTCTGGGGACCAATTGCCGAAATATTTTGCAGATTGGTTTCATC
AAAGGTCAGACCAGACCATTTTGCAAGTGATATATGATGATAATAAGCGC
CCCTCGGGTATCCCTGAAAGAATCTCTGGGTCCAGCTCAGGGACAACAGC
CACCTTGACCATCAGAGATGTCCGGGCTGAGGATGAAGGTGACTATTACT
GTTTCTCAGGATATGTTGATAGTGATAGCAAATTGTATGTTTTTGGCAGC
GGAACCCAGCTCACCGTCCTA

[spacer (SEQ ID NO: 362)] [J43 MP007 2001 (SEQ ID NO: 1011)] amino acid sequence:

(SEQ ID NO: 527)

[QGQSGQG][TIPRCGQHPKCKDTLGGGSSGGSISSGLLSGRSDNHGGGS
YELTQPPSASVNVGETVKITCSGDQLPKYFADWFHQRSDQTILQVIYDDN
KRPSGIPERISGSSSGTTATLTIRDVRAEDEGDYYCFSGYVDSDSKLYVF
GSGTQLTVL]

J43 MP007 2001 amino acid sequence:

(SEQ ID NO: 1083)

TIPRCGQHPKCKDTLGGGSSGGSISSGLLSGRSDNHGGGSYELTQPPSAS
VNVGETVKITCSGDQLPKYFADWFHQRSDQTILQVIYDDNKRPSGIPERI
SGSSSGTTATLTIRDVRAEDEGDYYCFSGYVDSDSKLYVFGSGTQLTVL

[spacer (SEQ ID NO: 918)] [J43 MP007 2001 (SEQ ID NO: 1012)] nucleic acid sequence:

(SEQ ID NO: 528)

[CAAGGCCAGTCTGGCCAAGGT][ACTATTCCGAGGTGCGGTCAGCATCC
GAAGTGCAAGGATACTTTGGGAGGTGGCTCGAGCGGCGGCTCTATCTCTT
CCGGACTGCTGTCCGGCAGATCCGACAATCACGGCGGAGGCTCTTATGAG
CTGACTCAGCCACCTTCAGCATCAGTCAATGTAGGAGAGACTGTCAAAAT
CACCTGCTCTGGGGACCAATTGCCGAAATATTTTGCAGATTGGTTTCATC
AAAGGTCAGACCAGACCATTTTGCAAGTGATATATGATGATAATAAGCGC
CCCTCGGGTATCCCTGAAAGAATCTCTGGGTCCAGCTCAGGGACAACAGC
CACCTTGACCATCAGAGATGTCCGGGCTGAGGATGAAGGTGACTATTACT
GTTTCTCAGGATATGTTGATAGTGATAGCAAATTGTATGTTTTTGGCAGC
GGAACCCAGCTCACCGTCCTA

[spacer (SEQ ID NO: 362)] [J43 MP008 2001 (SEQ ID NO: 1013)] amino acid sequence:

(SEQ ID NO: 529)

[QGQSGQG][ACRICQDHPKTKWNSGGGSSGGSISSGLLSGRSDNHGGGS
YELTQPPSASVNVGETVKITCSGDQLPKYFADWFHQRSDQTILQVIYDDN
KRPSGIPERISGSSSGTTATLTIRDVRAEDEGDYYCFSGYVDSDSKLYVF
GSGTQLTVL]

J43 MP008 2001 amino acid sequence:

(SEQ ID NO: 1084)

ACRICQDHPKTKWNSGGGSSGGSISSGLLSGRSDNHGGGSYELTQPPSAS
VNVGETVKITCSGDQLPKYFADWFHQRSDQTILQVIYDDNKRPSGIPERI
SGSSSGTTATLTIRDVRAEDEGDYYCFSGYVDSDSKLYVFGSGTQLTVL

[spacer (SEQ ID NO: 918)] [J43 MP008 2001 (SEQ ID NO: 1014)] nucleic acid sequence:

(SEQ ID NO: 530)

[CAAGGCCAGTCTGGCCAAGGT][GCGTGCCGTATTTGTCAGGATCATCC
TAAGACGAAGTGGAATTCTGGAGGTGGCTCGAGCGGCGGCTCTATCTCTT
CCGGACTGCTGTCCGGCAGATCCGACAATCACGGCGGAGGCTCTTATGAG
CTGACTCAGCCACCTTCAGCATCAGTCAATGTAGGAGAGACTGTCAAAAT
CACCTGCTCTGGGGACCAATTGCCGAAATATTTTGCAGATTGGTTTCATC
AAAGGTCAGACCAGACCATTTTGCAAGTGATATATGATGATAATAAGCGC
CCCTCGGGTATCCCTGAAAGAATCTCTGGGTCCAGCTCAGGGACAACAGC
CACCTTGACCATCAGAGATGTCCGGGCTGAGGATGAAGGTGACTATTACT
GTTTCTCAGGATATGTTGATAGTGATAGCAAATTGTATGTTTTTGGCAGC
GGAACCCAGCTCACCGTCCTA

[spacer (SEQ ID NO: 362)] [J43 MP009 2001 (SEQ ID NO: 1015)] amino acid sequence:

(SEQ ID NO: 531)

[QGQSGQG][LIQCTGNLDHKCKHYGGGSSGGSISSGLLSGRSDNHGGGS
YELTQPPSASVNVGETVKITCSGDQLPKYFADWFHQRSDQTILQVIYDDN
KRPSGIPERISGSSSGTTATLTIRDVRAEDEGDYYCFSGYVDSDSKLYVF
GSGTQLTVL]

J43 MP009 2001 amino acid sequence:

(SEQ ID NO: 1085)

LIQCTGNLDHKCKHYGGGSSGGSISSGLLSGRSDNHGGGSYELTQPPSAS
VNVGETVKITCSGDQLPKYFADWFHQRSDQTILQVIYDDNKRPSGIPERI
SGSSSGTTATLTIRDVRAEDEGDYYCFSGYVDSDSKLYVFGSGTQLTVL

[spacer (SEQ ID NO: 918)] [J43 MP009 2001 (SEQ ID NO: 1016)] nucleic acid sequence:

(SEQ ID NO: 532)

[CAAGGCCAGTCTGGCCAAGGT][CTTATTCAGTGCACTGGTAATCTTGA
TCATAAGTGCAAGCATTATGGAGGTGGCTCGAGCGGCGGCTCTATCTCTT
CCGGACTGCTGTCCGGCAGATCCGACAATCACGGCGGAGGCTCTTATGAG
CTGACTCAGCCACCTTCAGCATCAGTCAATGTAGGAGAGACTGTCAAAAT
CACCTGCTCTGGGGACCAATTGCCGAAATATTTTGCAGATTGGTTTCATC
AAAGGTCAGACCAGACCATTTTGCAAGTGATATATGATGATAATAAGCGC
CCCTCGGGTATCCCTGAAAGAATCTCTGGGTCCAGCTCAGGGACAACAGC
CACCTTGACCATCAGAGATGTCCGGGCTGAGGATGAAGGTGACTATTACT
GTTTCTCAGGATATGTTGATAGTGATAGCAAATTGTATGTTTTTGGCAGC
GGAACCCAGCTCACCGTCCT

[spacer (SEQ ID NO: 362)] [J43 MP010 2001 (SEQ ID NO: 1017)] amino acid sequence:

(SEQ ID NO: 533)

[QGQSGQG][IPCHHSADHKHKCTSGGGSSGGSISSGLLSGRSDNHGGGS
YELTQPPSASVNVGETVKITCSGDQLPKYFADWFHQRSDQTILQVIYDDN
KRPSGIPERISGSSSGTTATLTIRDVRAEDEGDYYCFSGYVDSDSKLYVF
GSGTQLTVL]

J43 MP010 2001 amino acid sequence:

(SEQ ID NO: 1086)

IPCHHSADHKHKCTSGGGSSGGSISSGLLSGRSDNHGGGSYELTQPPSAS
VNVGETVKITCSGDQLPKYFADWFHQRSDQTILQVIYDDNKRPSGIPERI
SGSSSGTTATLTIRDVRAEDEGDYYCFSGYVDSDSKLYVFGSGTQLTVL

[spacer (SEQ ID NO: 918)] [J43 MP010 2001 (SEQ ID NO: 1018)] nucleic acid sequence:

(SEQ ID NO: 534)

[CAAGGCCAGTCTGGCCAAGGT][ATTCCTTGCCATCATAGTGCTGATCA
TAAGCATAAGTGCACGAGTGGAGGTGGCTCGAGCGGCGGCTCTATCTCTT
CCGGACTGCTGTCCGGCAGATCCGACAATCACGGCGGAGGCTCTTATGAG
CTGACTCAGCCACCTTCAGCATCAGTCAATGTAGGAGAGACTGTCAAAAT
CACCTGCTCTGGGGACCAATTGCCGAAATATTTTGCAGATTGGTTTCATC
AAAGGTCAGACCAGACCATTTTGCAAGTGATATATGATGATAATAAGCGC
CCCTCGGGTATCCCTGAAAGAATCTCTGGGTCCAGCTCAGGGACAACAGC
CACCTTGACCATCAGAGATGTCCGGGCTGAGGATGAAGGTGACTATTACT
GTTTCTCAGGATATGTTGATAGTGATAGCAAATTGTATGTTTTTGGCAGC
GGAACCCAGCTCACCGTCCTA

[spacer (SEQ ID NO: 362)] [J43 MP011 2001 (SEQ ID NO: 1019)] amino acid sequence:

(SEQ ID NO: 535)

[QGQSGQG][SRQICADYNCHNKYKGGGSSGGSISSGLLSGRSDNHGGGS
YELTQPPSASVNVGETVKITCSGDQLPKYFADWFHQRSDQTILQVIYDDN
KRPSGIPERISGSSSGTTATLTIRDVRAEDEGDYYCFSGYVDSDSKLYVF
GSGTQLTVL]

J43 MP011 2001 amino acid sequence:

(SEQ ID NO: 1087)

SRQICADYNCHNKYKGGGSSGGSISSGLLSGRSDNHGGGSYELTQPPSAS
VNVGETVKITCSGDQLPKYFADWFHQRSDQTILQVIYDDNKRPSGIPERI
SGSSSGTTATLTIRDVRAEDEGDYYCFSGYVDSDSKLYVFGSGTQLTVL

[spacer (SEQ ID NO: 918)] [J43 MP011 2001 (SEQ ID NO: 1020)] nucleic acid sequence:

(SEQ ID NO: 536)

[CAAGGCCAGTCTGGCCAAGGT][TCGCGGCAGATTTGCGCTGATTATAA
TTGCCATAATAAGTATAAGGGAGGTGGCTCGAGCGGCGGCTCTATCTCTT
CCGGACTGCTGTCCGGCAGATCCGACAATCACGGCGGAGGCTCTTATGAG
CTGACTCAGCCACCTTCAGCATCAGTCAATGTAGGAGAGACTGTCAAAAT
CACCTGCTCTGGGGACCAATTGCCGAAATATTTTGCAGATTGGTTTCATC
AAAGGTCAGACCAGACCATTTTGCAAGTGATATATGATGATAATAAGCGC
CCCTCGGGTATCCCTGAAAGAATCTCTGGGTCCAGCTCAGGGACAACAGC
CACCTTGACCATCAGAGATGTCCGGGCTGAGGATGAAGGTGACTATTACT
GTTTCTCAGGATATGTTGATAGTGATAGCAAATTGTATGTTTTTGGCAGC
GGAACCCAGCTCACCGTCCTA

[spacer (SEQ ID NO: 362)] [J43 MP012 2001 (SEQ ID NO: 1021)] amino acid sequence:

(SEQ ID NO: 537)

[QGQSGQG][QPCNPQIDHKIKCIYGGGSSGGSISSGLLSGRSDNHGGGS
YELTQPPSASVNVGETVKITCSGDQLPKYFADWFHQRSDQTILQVIYDDN
KRPSGIPERISGSSSGTTATLTIRDVRAEDEGDYYCFSGYVDSDSKLYVF
GSGTQLTVL]

J43 MP012 2001 amino acid sequence:

(SEQ ID NO: 1088)

QPCNPQIDHKIKCIYGGGSSGGSISSGLLSGRSDNHGGGSYELTQPPSAS
VNVGETVKITCSGDQLPKYFADWFHQRSDQTILQVIYDDNKRPSGIPERI
SGSSSGTTATLTIRDVRAEDEGDYYCFSGYVDSDSKLYVFGSGTQLTVL

[spacer (SEQ ID NO: 918)] [J43 MP012 2001 (SEQ ID NO: 1022)] nucleic acid sequence:

(SEQ ID NO: 538)

[CAAGGCCAGTCTGGCCAAGGT][CAGCCTTGCAATCCGCAGATTGATCA
TAAGATTAAGTGCATTTATGGAGGTGGCTCGAGCGGCGGCTCTATCTCTT
CCGGACTGCTGTCCGGCAGATCCGACAATCACGGCGGAGGCTCTTATGAG
CTGACTCAGCCACCTTCAGCATCAGTCAATGTAGGAGAGACTGTCAAAAT
CACCTGCTCTGGGGACCAATTGCCGAAATATTTTGCAGATTGGTTTCATC
AAAGGTCAGACCAGACCATTTTGCAAGTGATATATGATGATAATAAGCGC
CCCTCGGGTATCCCTGAAAGAATCTCTGGGTCCAGCTCAGGGACAACAGC
CACCTTGACCATCAGAGATGTCCGGGCTGAGGATGAAGGTGACTATTACT
GTTTCTCAGGATATGTTGATAGTGATAGCAAATTGTATGTTTTTGGCAGC
GGAACCCAGCTCACCGTCCTA

[spacer (SEQ ID NO: 362)] [J43 MP013 2001 (SEQ ID NO: 1023)] amino acid sequence:

(SEQ ID NO: 539)

[QGQSGQG][HYTICMTHNKCKDMAGGGSSGGSISSGLLSGRSDNHGGGS
YELTQPPSASVNVGETVKITCSGDQLPKYFADWFHQRSDQTILQVIYDDN
KRPSGIPERISGSSSGTTATLTIRDVRAEDEGDYYCFSGYVDSDSKLYVF
GSGTQLTVL]

J43 MP013 2001 amino acid sequence:

(SEQ ID NO: 1089)

HYTICMTHNKCKDMAGGGSSGGSISSGLLSGRSDNHGGGSYELTQPPSAS
VNVGETVKITCSGDQLPKYFADWFHQRSDQTILQVIYDDNKRPSGIPERI
SGSSSGTTATLTIRDVRAEDEGDYYCFSGYVDSDSKLYVFGSGTQLTVL

[spacer (SEQ ID NO: 918)] [J43 MP013 2001 (SEQ ID NO: 1024)] nucleic acid sequence:

(SEQ ID NO: 540)

[CAAGGCCAGTCTGGCCAAGGT][CATTATACTATTTGCATGACGCATAA
TAAGTGCAAGGATATGGCGGGAGGTGGCTCGAGCGGCGGCTCTATCTCTT
CCGGACTGCTGTCCGGCAGATCCGACAATCACGGCGGAGGCTCTTATGAG
CTGACTCAGCCACCTTCAGCATCAGTCAATGTAGGAGAGACTGTCAAAAT
CACCTGCTCTGGGGACCAATTGCCGAAATATTTTGCAGATTGGTTTCATC
AAAGGTCAGACCAGACCATTTTGCAAGTGATATATGATGATAATAAGCGC
CCCTCGGGTATCCCTGAAAGAATCTCTGGGTCCAGCTCAGGGACAACAGC
CACCTTGACCATCAGAGATGTCCGGGCTGAGGATGAAGGTGACTATTACT
GTTTCTCAGGATATGTTGATAGTGATAGCAAATTGTATGTTTTTGGCAGC
GGAACCCAGCTCACCGTCCTA

[spacer (SEQ ID NO: 362)] [J43 MP014 2001 (SEQ ID NO: 1025)] amino acid sequence:

(SEQ ID NO: 541)

[QGQSGQG][ANSCLAVEHKCKHNYGGGSSGGSISSGLLSGRSDNHGGGS
YELTQPPSASVNVGETVKITCSGDQLPKYFADWFHQRSDQTILQVIYDDN
KRPSGIPERISGSSSGTTATLTIRDVRAEDEGDYYCFSGYVDSDSKLYVF
GSGTQLTVL

J43 MP014 2001 amino acid sequence:

(SEQ ID NO: 1090)

ANSCLAVEHKCKHNYGGGSSGGSISSGLLSGRSDNHGGGSYELTQPPSAS
VNVGETVKITCSGDQLPKYFADWFHQRSDQTILQVIYDDNKRPSGIPERI
SGSSSGTTATLTIRDVRAEDEGDYYCFSGYVDSDSKLYVFGSGTQLTVL

[spacer (SEQ ID NO: 918)] [J43 MP014 2001 (SEQ ID NO: 1026)] nucleic acid sequence:

(SEQ ID NO: 542)

[CAAGGCCAGTCTGGCCAAGGT][GCTAATAGTTGCCTTGCTGTTGAGCA
TAAGTGCAAGCATAATTATGGAGGTGGCTCGAGCGGCGGCTCTATCTCTT
CCGGACTGCTGTCCGGCAGATCCGACAATCACGGCGGAGGCTCTTATGAG
CTGACTCAGCCACCTTCAGCATCAGTCAATGTAGGAGAGACTGTCAAAAT
CACCTGCTCTGGGGACCAATTGCCGAAATATTTTGCAGATTGGTTTCATC
AAAGGTCAGACCAGACCATTTTGCAAGTGATATATGATGATAATAAGCGC
CCCTCGGGTATCCCTGAAAGAATCTCTGGGTCCAGCTCAGGGACAACAGC
CACCTTGACCATCAGAGATGTCCGGGCTGAGGATGAAGGTGACTATTACT
GTTTCTCAGGATATGTTGATAGTGATAGCAAATTGTATGTTTTTGGCAGC
GGAACCCAGCTCACCGTCCTA

### Reformatted Anti-Mouse PD-1 Heavy and Light Chains:

[0879] J43v2 light chain (LC) amino acid sequence:

(SEQ ID NO: 543)

YELTQPPSASVNVGETVKITCSGDQLPKYFADWFHQRSDQTILQVIYDDN
KRPSGIPERISGSSSGTTATLTIRDVRAEDEGDYYCFSGYVDSDSKLYVF
GSGTQLTVLGGPKSSPKVTVFPPSPEELRTNKATLVCLVNDFYPGSATVT
WKANGATINDGVKTTKPSKQGQNYMTSSYLSLTADQWKSHNRVSCQVTHE
GETVEKSLSPAECL

J43v2 LC nucleotide sequence 1:

(SEQ ID NO: 544)

TATGAGCTGACTCAGCCACCTTCAGCATCAGTCAATGTAGGAGAGACTGT
CAAAATCACCTGCTCTGGGGACCAATTGCCGAAATATTTTGCAGATTGGT
TTCATCAAAGGTCAGACCAGACCATTTTGCAAGTGATATATGATGATAAT
AAGCGCCCCTCGGGTATCCCTGAAAGAATCTCTGGGTCCAGCTCAGGGAC
AACAGCCACCTTGACCATCAGAGATGTCCGGGCTGAGGATGAAGGTGACT
ATTACTGTTTCTCAGGATATGTTGATAGTGATAGCAAATTGTATGTTTTT
GGCAGCGGAACCCAGCTCACCGTCCTAGGTGGACCCAAGTCTTCTCCCAA
AGTCACAGTGTTTCCACCTTCACCTGAGGAGCTCCGGACAAACAAAGCCA
CACTGGTGTGTCTGGTTAATGACTTCTACCCGGGTTCTGCAACAGTGACC
TGGAAGGCAAATGGAGCAACTATCAATGATGGGGTGAAGACTACAAAGCC
TTCCAAACAGGGCCAAAACTACATGACCAGCAGCTACCTAAGTTTGACAG
CAGACCAGTGGAAATCTCACAACAGGGTTTCCTGCCAAGTTACCCATGAA
GGGGAAACTGTGGAGAAGAGTTTGTCCCCTGCAGAATGTCTT

J43v2 LC nucleotide sequence 2:

(SEQ ID NO: 545)

TACGAGCTGACCCAGCCTCCTAGCGCCTCCGTGAATGTGGGCGAGACAGT
GAAGATCACCTGTAGCGGCGACCAGCTGCCCAAGTACTTCGCCGACTGGT
TCCACCAGCGGAGCGACCAGACAATCCTGCAAGTGATCTACGACGACAAC
AAGCGGCCCAGCGGCATCCCCGAGAGAATCAGCGGAAGCAGCAGCGGCAC
CACCGCCACCCTGACCATTAGAGATGTGCGGGCCGAGGACGAGGGCGACT
ACTACTGCTTTAGCGGCTACGTGGACAGCGACAGCAAGCTGTACGTGTTC
GGCTCCGGTACCCAGCTGACAGTGCTGGGCGGACCTAAGAGCAGCCCCAA
AGTGACCGTGTTCCCCCCAAGCCCCGAGGAACTGAGGACCAACAAGGCCA
CCCTCGTGTGCCTCGTGAACGACTTCTACCCTGGCAGCGCCACCGTGACC
TGGAAAGCCAATGGCGCCACCATCAACGACGGCGTGAAAACCACCAAGCC
CAGCAAGCAGGGCCAGAACTACATGACCAGCAGCTACCTGAGCCTGACCG
CCGACCAGTGGAAGTCCCACAACAGAGTGTCCTGCCAAGTGACCCACGAG
GGGGAAACCGTGGAAAAGAGCCTGAGCCCTGCCGAGTGCCTG

J43v2 mIgG2a heavy chain (HC) amino acid sequence:

(SEQ ID NO: 546)

EVRLLESGGGLVKPEGSLKLSCVASGFTFSDYFMSWVRQAPGKGLEWVAH
IYTKSYNYATYYSGSVKGRFTISRDDSRSMVYLQMNNLRTEDTATYYCTR
DGSGYPSLDFWGQGTQVTVSSAKTTAPSVYPLAPVCGDTTGSSVTLGCLV
KGYFPEPVTLTWNSGSLSSGVHTFPAVLQSDLYTLSSSVTVTSSTWPSQS
ITCNVAHPASSTKVDKKIEPRGPTIKPCPPCKCPAPNLLGGPSVFIFPPK
IKDVLMISLSPIVTCVVVDVSEDDPDVQISWFVNNVEVHTAQTQTHREDY
NSTLRVVSALPIQHQDWMSGKEFKCKVNNKDLPAPIERTISKPKGSVRAP
QVYVLPPPEEEMTKKQVTLTCMVTDFMPEDIYVEWTNNGKTELNYKNTEP
VLDSDGSYFMYSKLRVEKKNWVERNSYSCSVVHEGLHNHHTTKSFSRTPG
K

J43v2 mIgG2a HC nucleic acid sequence:

(SEQ ID NO: 547)

GAGGTGCGGCTTCTGGAGTCTGGTGGAGGATTAGTGAAGCCTGAGGGGTC
ACTGAAACTCTCCTGTGTGGCCTCTGGATTCACCTTCAGTGACTATTTCA
TGAGCTGGGTCCGCCAGGCTCCAGGGAAGGGGCTGGAGTGGGTTGCTCAC
ATATACACGAAAAGTTATAATTATGCAACTTATTACTCGGGTTCGGTGAA
AGGCAGATTCACCATCTCCAGAGATGATTCCCGAAGCATGGTCTACCTGC
AAATGAACAACCTGAGAACTGAGGACACGGCCACTTATTACTGTACAAGA
GATGGAAGCGGATATCCCTCTCTGGATTTCTGGGGTCAAGGGACCCAAGT
CACTGTCTCCTCAGCTAAAACAACAGCCCCATCGGTCTATCCACTGGCCC
CTGTGTGTGGAGATACAACTGGCTCCTCGGTGACTCTAGGATGCCTGGTC
AAGGGTTATTTCCCTGAGCCAGTGACCTTGACCTGGAACTCTGGATCCCT
GTCCAGTGGTGTGCACACCTTCCCAGCTGTCCTGCAGTCTGACCTCTACA
CCCTCAGCAGCTCAGTGACTGTAACCTCGAGCACCTGGCCCAGCCAGTCC
ATCACCTGCAATGTGGCCCACCCGGCAAGCAGCACCAAGGTGGACAAGAA
AATTGAGCCCAGAGGGCCCACAATCAAGCCCTGTCCTCCATGCAAATGCC
CAGCACCTAACCTCTTGGGTGGACCATCCGTCTTCATCTTCCCTCCAAAG
ATCAAGGATGTACTCATGATCTCCCTGAGCCCCATAGTCACATGTGTGGT
GGTGGATGTGAGCGAGGATGACCCAGATGTCCAGATCAGCTGGTTTGTGA
ACAACGTGGAAGTACACACAGCTCAGACACAAACCCATAGAGAGGATTAC
AACAGTACTCTCCGGGTGGTCAGTGCCCTCCCCATCCAGCACCAGGACTG
GATGAGTGGCAAGGAGTTCAAATGCAAGGTCAACAACAAAGACCTCCCAG
CGCCCATCGAGAGAACCATCTCAAAACCCAAAGGGTCAGTAAGAGCTCCA
CAGGTATATGTCTTGCCTCCACCAGAAGAAGAGATGACTAAGAAACAGGT
CACTCTGACCTGCATGGTCACAGACTTCATGCCTGAAGACATTTACGTGG
AGTGGACCAACAACGGGAAAACAGAGCTAAACTACAAGAACACTGAACCA
GTCCTGGACTCTGATGGTTCTTACTTCATGTACAGCAAGCTGAGAGTGGA
AAAGAAGAACTGGGTGGAAAGAAATAGCTACTCCTGTTCAGTGGTCCACG
AGGGTCTGCACAATCACCACACGACTAAGAGCTTCTCCCGGACTCCGGGT
AAA

### Example 16

### Activatable Anti-mPD-1 Antibodies with a Range of Masking Efficiencies

[0880] This example describes the modulation of anti-mPD-1 antibody masking efficiencies by masking moiety truncation and single amino-acid substitution.

[0881] Four J43 activatable antibodies were selected to generate families of activatable anti-mPD-1 antibodies by masking moiety truncation or amino acid substitution of one or more MM residues. Table 18 lists the designed MMs. Activatable J43v2 antibodies with the designed MM and 2001 substrate were produced by transfection of 30 mL HEK293 cells and selected activatable antibodies (sequences MPtrunc ELISA activatable antibody LCs) were evaluated for masking by ELISA as described in Example 15 (FIG. 23).

[0882] In some embodiments, the activatable antibody also includes a spacer sequence. In some embodiments, the spacer is joined directly to the MM of the activatable antibody. In some embodiments, the spacer is joined directly to the MM of the activatable antibody in the structural arrangement from N-terminus to C-terminus of spacer-MM-CM-AB. In some embodiments, the spacer joined directly to the N-terminus of MM of the activatable antibody is selected from the group consisting of QGQSGQG (SEQ ID NO: 362), QGQSGQ (SEQ ID NO: 913), QGQSG (SEQ ID NO: 914), QGQS (SEQ ID NO: 915), QGQ (SEQ ID NO: 916), QG (SEQ ID NO: 917), and Q. In some embodiments, the spacer includes at least the amino acid sequence QGQSGQG (SEQ ID NO: 362). In some embodiments, the spacer includes at least the amino acid sequence QGQSGQ (SEQ ID NO: 913). In some embodiments, the spacer includes at least the amino acid sequence QGQSG (SEQ ID NO: 914). In some embodiments, the spacer includes at least the amino acid sequence QGQS (SEQ ID NO: 915), In some embodiments, the spacer includes at least the amino acid sequence QGQ (SEQ ID NO: 916). In some embodiments, the spacer includes at least the amino acid sequence QG (SEQ ID NO: 917). In some embodiments, the spacer includes at least the amino acid residue Q. In some embodiments, the activatable antibody does not include a spacer sequence.

[0883] While the sequences shown below include the spacer sequence of SEQ ID NO: 362, those of ordinary skill in the art appreciate that the activatable anti-PD-1 antibodies of the disclosure can include any suitable spacer sequence, such as, for example, a spacer sequence selected from the group consisting of QGQSGQG (SEQ ID NO: 362), QGQSGQ (SEQ ID NO: 913), QGQSG (SEQ ID NO: 914), QGQS (SEQ ID NO: 915), QGQ (SEQ ID NO: 916), QG (SEQ ID NO: 917), and Q. While the sequences shown below include the spacer sequence of SEQ ID NO: 362, those of ordinary skill in the art will also appreciate that activatable anti-PD-1 antibodies of the disclosure in some embodiments do not include a spacer sequence.

TABLE 18
Masking moiety sequences

| Mask | Amino Acid Sequence | SEQ ID NO: |
|---|---|---|
| MP8-1 | QDHPKTKWNS | 548 |
| MP8-2 | ACRICQDHPATKWNS | 549 |
| MP8-3 | ACRICQDHPKTAWNS | 550 |
| MP8-4 | ACRICQDAPKTKWNS | 551 |
| MP8-5 | ACRICQDHAKTKWNS | 552 |
| MP8-6 | DHPATKWNS | 553 |
| MP8-7 | DHPKTAWNS | 554 |
| MP8-8 | DAPKTKWNS | 555 |
| MP8-9 | DAPATKWNS | 556 |
| MP8-10 | ACRICQDHP | 557 |
| MP7-1 | HPQSKDTL | 558 |
| MP7-2 | HPKSQDTL | 559 |
| MP7-3 | TIPRCGQHPLCLDTL | 560 |
| MP7-4 | HPLSLDTL | 561 |
| MP7-5 | HPASKDTL | 562 |
| MP7-6 | HPKSADTL | 563 |
| MP5-1 | PGNCHPLQKELCQFI | 564 |
| MP5-2 | HPLQKELAQFI | 565 |
| MP5-3 | HPLALELAQFI | 566 |
| MP5-4 | PGNCHPLQLELCQFI | 567 |
| MP3-1 | TNIWSCQTYCDHAHA | 568 |
| MP3-2 | TNIWSCQTYCDHAHL | 569 |
| MP3-3 | TNIWSCQTYCDHLHA | 570 |
| MP3-4 | TNIWSCQTYCDHKHA | 571 |

[spacer (SEQ ID NO: 362)] [J43 MP5-2 2001 (SEQ ID NO: 1027)] amino acid sequence:

(SEQ ID NO: 572)

[QGQSGQG][HPLQKELAQFIGGGSSGGSISSGLLSGRSDNHGGGSYE
LTQPPSASVNVGETVKITCSGDQLPKYFADWFHQRSDQTILQVIYDDNK
RPSGIPERISGSSSGTTATLTIRDVRAEDEGDYYCFSGYVDSDSKLYV
FGSGTQLTVL]

J43 MP5-2 2001 amino acid sequence:

(SEQ ID NO: 1113)

HPLQKELAQFIGGGSSGGSISSGLLSGRSDNHGGGSYELTQPPSASVNVG
ETVKITCSGDQLPKYFADWFHQRSDQTILQVIYDDNKRPSGIPERISGSS
SGTTATLTIRDVRAEDEGDYYCFSGYVDSDSKLYVFGSGTQLTVL

[spacer (SEQ ID NO: 918)] [J43 MP5-2 2001 (SEQ ID NO: 1038)] nucleic acid sequence:

(SEQ ID NO: 573)

[CAAGGCCAGTCTGGCCAAGGT][CATCCTCTGCAGAAGGAGCTGGCCCA
GTTTATTGGAGGTGGCTCGAGCGGCGGCTCTATCTCTTCCGGACTGCTGT
CCGGCAGATCCGACAATCACGGCGGAGGCTCTTACGAGCTGACCCAGCCT
CCTAGCGCCTCCGTGAATGTGGGCGAGACAGTGAAGATCACCTGTAGCGG
CGACCAGCTGCCCAAGTACTTCGCCGACTGGTTCCACCAGCGGAGCGACC
AGACAATCCTGCAAGTGATCTACGACGACAACAAGCGGCCCAGCGGCATC
CCCGAGAGAATCAGCGGAAGCAGCAGCGGCACCACCGCCACCCTGACCAT
TAGAGATGTGCGGGCCGAGGACGAGGGCGACTACTACTGCTTTAGCGGCT
ACGTGGACAGCGACAGCAAGCTGTACGTGTTCGGCTCCGGTACCCAGCTG
ACAGTGCTGGGCGGACCTAAGAGCAGCCCCAAAGTGACCGTGTTCCCCCC
AAGCCCCGAGGAACTGAGGACCAACAAGGCCACCCTCGTGTGCCTCGTGA
ACGACTTCTACCCTGGCAGCGCCACCGTGACCTGGAAAGCCAATGGCGCC
ACCATCAACGACGGCGTGAAAACCACCAAGCCCAGCAAGCAGGGCCAGAA
CTACATGACCAGCAGCTACCTGAGCCTGACCGCCGACCAGTGGAAGTCCC
ACAACAGAGTGTCCTGCCAAGTGACCCACGAGGGGGAAACCGTGGAAAAG
AGCCTGAGCCCTGCCGAGTGCCTG

[spacer (SEQ ID NO: 362)] [J43 MP7-1 2001 (SEQ ID NO: 1039)] amino acid sequence:

(SEQ ID NO: 574)

[QGQSGQG][HPQSKDTLGGGSSGGSISSGLLSGRSDNHGGGSYELTQPP
SASVNVGETVKITCSGDQLPKYFADWFHQRSDQTILQVIYDDNKRPSGIP
ERISGSSSGTTATLTIRDVRAEDEGDYYCFSGYVDSDSKLYVFGSGTQLT
VL]

J43 MP7-1 2001 amino acid sequence:

(SEQ ID NO: 1114)

HPQSKDTLGGGSSGGSISSGLLSGRSDNHGGGSYELTQPPSASVNVGETV
KITCSGDQLPKYFADWFHQRSDQTILQVIYDDNKRPSGIPERISGSSSGT
TATLTIRDVRAEDEGDYYCFSGYVDSDSKLYVFGSGTQLTVL

[spacer (SEQ ID NO: 918)] [J43 MP7-1 2001 (SEQ ID NO: 1029)] nucleic acid sequence:

(SEQ ID NO: 575)

[CAAGGCCAGTCTGGCCAAGGT][CATCCGCAGTCTAAGGATACTTTGGG
AGGTGGCTCGAGCGGCGGCTCTATCTCTTCCGGACTGCTGTCCGGCAGAT
CCGACAATCACGGCGGAGGCTCTTACGAGCTGACCCAGCCTCCTAGCGCC
TCCGTGAATGTGGGCGAGACAGTGAAGATCACCTGTAGCGGCGACCAGCT
GCCCAAGTACTTCGCCGACTGGTTCCACCAGCGGAGCGACCAGACAATCC
TGCAAGTGATCTACGACGACAACAAGCGGCCCAGCGGCATCCCCGAGAGA
ATCAGCGGAAGCAGCAGCGGCACCACCGCCACCCTGACCATTAGAGATGT
GCGGGCCGAGGACGAGGGCGACTACTACTGCTTTAGCGGCTACGTGGACA
GCGACAGCAAGCTGTACGTGTTCGGCTCCGGTACCCAGCTGACAGTGCTG
GGCGGACCTAAGAGCAGCCCCAAAGTGACCGTGTTCCCCCCAAGCCCCGA
GGAACTGAGGACCAACAAGGCCACCCTCGTGTGCCTCGTGAACGACTTCT
ACCCTGGCAGCGCCACCGTGACCTGGAAAGCCAATGGCGCCACCATCAAC
GACGGCGTGAAAACCACCAAGCCCAGCAAGCAGGGCCAGAACTACATGAC
CAGCAGCTACCTGAGCCTGACCGCCGACCAGTGGAAGTCCCACAACAGAG
TGTCCTGCCAAGTGACCCACGAGGGGGAAACCGTGGAAAAGAGCCTGAGC
CCTGCCGAGTGCCTG

### MPtrunc ELISA Activatable Antibody LCs:

[0884] [spacer (SEQ ID NO: 362)] [J43 MP7-5 2001 (SEQ ID NO: 1115)] amino acid sequence:

(SEQ ID NO: 576)

[QGQSGQG][HPASKDTLGGGSSGGSISSGLLSGRSDNHGGGSYELTQPP
SASVNVGETVKITCSGDQLPKYFADWFHQRSDQTILQVIYDDNKRPSGIP
ERISGSSSGTTATLTIRDVRAEDEGDYYCFSGYVDSDSKLYVFGSGTQLT
VL]

J43 MP7-5 2001 amino acid sequence:

(SEQ ID NO: 1115)

HPASKDTLGGGSSGGSISSGLLSGRSDNHGGGSYELTQPPSASVNVGETV
KITCSGDQLPKYFADWFHQRSDQTILQVIYDDNKRPSGIPERISGSSSGT
TATLTIRDVRAEDEGDYYCFSGYVDSDSKLYVFGSGTQLTVL

[spacer (SEQ ID NO: 918)] [J43 MP7-5 2001 (SEQ ID NO: 1031)] nucleic acid sequence:

(SEQ ID NO: 577)

[CAAGGCCAGTCTGGCCAAGGT][CATCCGGCGTCTAAGGATACTTTGGG
AGGTGGCTCGAGCGGCGGCTCTATCTCTTCCGGACTGCTGTCCGGCAGAT
CCGACAATCACGGCGGAGGCTCTTACGAGCTGACCCAGCCTCCTAGCGCC
TCCGTGAATGTGGGCGAGACAGTGAAGATCACCTGTAGCGGCGACCAGCT
GCCCAAGTACTTCGCCGACTGGTTCCACCAGCGGAGCGACCAGACAATCC
TGCAAGTGATCTACGACGACAACAAGCGGCCCAGCGGCATCCCCGAGAGA
ATCAGCGGAAGCAGCAGCGGCACCACCGCCACCCTGACCATTAGAGATGT
GCGGGCCGAGGACGAGGGCGACTACTACTGCTTTAGCGGCTACGTGGACA
GCGACAGCAAGCTGTACGTGTTCGGCTCCGGTACCCAGCTGACAGTGCTG
GGCGGACCTAAGAGCAGCCCCAAAGTGACCGTGTTCCCCCCAAGCCCCGA
GGAACTGAGGACCAACAAGGCCACCCTCGTGTGCCTCGTGAACGACTTCT
ACCCTGGCAGCGCCACCGTGACCTGGAAAGCCAATGGCGCCACCATCAAC
GACGGCGTGAAAACCACCAAGCCCAGCAAGCAGGGCCAGAACTACATGAC
CAGCAGCTACCTGAGCCTGACCGCCGACCAGTGGAAGTCCCACAACAGAG
TGTCCTGCCAAGTGACCCACGAGGGGGAAACCGTGGAAAAGAGCCTGAGC
CCTGCCGAGTGCCTG

[spacer (SEQ ID NO: 362)] [J43 MP8-2 2001 (SEQ ID NO: 1032)] amino acid sequence:

(SEQ ID NO: 578)

[QGQSGQG][ACRICQDHPATKWNSGGGSSGGSISSGLLSGRSDNHGGGS
YELTQPPSASVNVGETVKITCSGDQLPKYFADWFHQRSDQTILQVIYDDN
KRPSGIPERISGSSSGTTATLTIRDVRAEDEGDYYCFSGYVDSDSKLYVF
GSGTQLTVL]

J43 MP8-2 2001 amino acid sequence:

(SEQ ID NO: 1116)

ACRICQDHPATKWNSGGGSSGGSISSGLLSGRSDNHGGGSYELTQPPSAS
VNVGETVKITCSGDQLPKYFADWFHQRSDQTILQVIYDDNKRPSGIPERI
SGSSSGTTATLTIRDVRAEDEGDYYCFSGYVDSDSKLYVFGSGTQLTVL

[spacer (SEQ ID NO: 918)] J43 MP8-2 2001 (SEQ ID NO: 1033)] nucleic acid sequence:

(SEQ ID NO: 579)

[CAAGGCCAGTCTGGCCAAGGT][GCGTGCCGTATTTGTCAGGATCATCC
TGCGACGAAGTGGAATTCTGGAGGTGGCTCGAGCGGCGGCTCTATCTCTT
CCGGACTGCTGTCCGGCAGATCCGACAATCACGGCGGAGGCTCTACGAGC
TGACCCAGCCTCCTAGCGCCTCCGTGAATGTGGGCGAGACAGTGAAGATC
ACCTGTAGCGGCGACCAGCTGCCCAAGTACTTCGCCGACTGGTTCCACCA
GCGGAGCGACCAGACAATCCTGCAAGTGATCTACGACGACAACAAGCGGC
CCAGCGGCATCCCCGAGAGAATCAGCGGAAGCAGCAGCGGCACCACCGCC
ACCCTGACCATTAGAGATGTGCGGGCCGAGGACGAGGGCGACTACTACTG
CTTTAGCGGCTACGTGGACAGCGACAGCAAGCTGTACGTGTTCGGCTCCG
GTACCCAGCTGACAGTGCTGGGCGGACCTAAGAGCAGCCCCAAAGTGACC
GTGTTCCCCCCAAGCCCCGAGGAACTGAGGACCAACAAGGCCACCCTCGT
GTGCCTCGTGAACGACTTCTACCCTGGCAGCGCCACCGTGACCTGGAAAG
CCAATGGCGCCACCATCAACGACGGCGTGAAAACCACCAAGCCCAGCAAG
CAGGGCCAGAACTACATGACCAGCAGCTACCTGAGCCTGACCGCCGACCA
GTGGAAGTCCCACAACAGAGTGTCCTGCCAAGTGACCCACGAGGGGGAAA
CCGTGGAAAAGAGCCTGAGCCCTGCCGAGTGCCTG

[spacer (SEQ ID NO: 362)] [J43 MP8-8 2001 (SEQ ID NO: 1034)] amino acid sequence:

(SEQ ID NO: 580)
[QGQSGQG][DAPKTKWNSGGGSSGGSISSGLLSGRSDNHGGGSYELTQP
PSASVNVGETVKITCSGDQLPKYFADWFHQRSDQTILQVIYDDNKRPSGI
PERISGSSSGTTATLTIRDVRAEDEGDYYCFSGYVDSDSKLYVFGSGTQL
TVL]

J43 MP8-8 2001 amino acid sequence:

(SEQ ID NO: 1117)
DAPKTKWNSGGGSSGGSISSGLLSGRSDNHGGGSYELTQPPSASVNVGET
VKITCSGDQLPKYFADWFHQRSDQTILQVIYDDNKRPSGIPERISGSSSG
TTATLTIRDVRAEDEGDYYCFSGYVDSDSKLYVFGSGTQLTVL

[spacer (SEQ ID NO: 918)] J43 MP8-8 2001 (SEQ ID NO: 1035)] nucleic acid sequence:

(SEQ ID NO: 581)
[CAAGGCCAGTCTGGCCAAGGT][GATGCTCCTAAGACGAAGTGGAATTC
TGGAGGTGGCTCGAGCGGCGGCTCTATCTCTTCCGGACTGCTGTCCGGCA
GATCCGACAATCACGGCGGAGGCTCTTACGAGCTGACCCAGCCTCCTAGC
GCCTCCGTGAATGTGGGCGAGACAGTGAAGATCACCTGTAGCGGCGACCA
GCTGCCCAAGTACTTCGCCGACTGGTTCCACCAGCGGAGCGACCAGACAA
TCCTGCAAGTGATCTACGACGACAACAAGCGGCCCAGCGGCATCCCCGAG
AGAATCAGCGGAAGCAGCAGCGGCACCACCGCCACCCTGACCATTAGAGA
TGTGCGGGCCGAGGACGAGGGCGACTACTACTGCTTTAGCGGCTACGTGG
ACAGCGACAGCAAGCTGTACGTGTTCGGCTCCGGTACCCAGCTGACAGTG
CTGGGCGGACCTAAGAGCAGCCCCAAAGTGACCGTGTTCCCCCCAAGCCC
CGAGGAACTGAGGACCAACAAGGCCACCCTCGTGTGCCTCGTGAACGACT
TCTACCCTGGCAGCGCCACCGTGACCTGGAAAGCCAATGGCGCCACCATC
AACGACGGCGTGAAAACCACCAAGCCCAGCAAGCAGGGCCAGAACTACAT
GACCAGCAGCTACCTGAGCCTGACCGCCGACCAGTGGAAGTCCCACAACA
GAGTGTCCTGCCAAGTGACCCACGAGGGGGAAACCGTGGAAAAGAGCCTG
AGCCCTGCCGAGTGCCTG

[spacer (SEQ ID NO: 362)] [J43 MP8-9 2001 (SEQ ID NO: 1036)] amino acid sequence:

(SEQ ID NO: 582)
[QGQSGQG][DAPATKWNSGGGSSGGSISSGLLSGRSDNHGGGSYELTQP
PSASVNVGETVKITCSGDQLPKYFADWFHQRSDQTILQVIYDDNKRPSGI
PERISGSSSGTTATLTIRDVRAEDEGDYYCFSGYVDSDSKLYVFGSGTQL
TVL]

J43 MP8-9 2001 amino acid sequence:

(SEQ ID NO: 1118)
DAPATKWNSGGGSSGGSISSGLLSGRSDNHGGGSYELTQPPSASVNVGET
VKITCSGDQLPKYFADWFHQRSDQTILQVIYDDNKRPSGIPERISGSSSG
TTATLTIRDVRAEDEGDYYCFSGYVDSDSKLYVFGSGTQLTVL

[spacer (SEQ ID NO: 918)] [J43 MP8-9 2001 (SEQ ID NO: 1037)] nucleic acid sequence:

(SEQ ID NO: 583)
[CAAGGCCAGTCTGGCCAAGGT][GATGCTCCTGCGACGAAGTGGAATTC
TGGAGGTGGCTCGAGCGGCGGCTCTATCTCTTCCGGACTGCTGTCCGGCA
GATCCGACAATCACGGCGGAGGCTCTTACGAGCTGACCCAGCCTCCTAGC
GCCTCCGTGAATGTGGGCGAGACAGTGAAGATCACCTGTAGCGGCGACCA
GCTGCCCAAGTACTTCGCCGACTGGTTCCACCAGCGGAGCGACCAGACAA
TCCTGCAAGTGATCTACGACGACAACAAGCGGCCCAGCGGCATCCCCGAG
AGAATCAGCGGAAGCAGCAGCGGCACCACCGCCACCCTGACCATTAGAGA
TGTGCGGGCCGAGGACGAGGGCGACTACTACTGCTTTAGCGGCTACGTGG
ACAGCGACAGCAAGCTGTACGTGTTCGGCTCCGGTACCCAGCTGACAGTG
CTGGGCGGACCTAAGAGCAGCCCCAAAGTGACCGTGTTCCCCCCAAGCCC
CGAGGAACTGAGGACCAACAAGGCCACCCTCGTGTGCCTCGTGAACGACT
TCTACCCTGGCAGCGCCACCGTGACCTGGAAAGCCAATGGCGCCACCATC
AACGACGGCGTGAAAACCACCAAGCCCAGCAAGCAGGGCCAGAACTACAT
GACCAGCAGCTACCTGAGCCTGACCGCCGACCAGTGGAAGTCCCACAACA
GAGTGTCCTGCCAAGTGACCCACGAGGGGGAAACCGTGGAAAAGAGCCTG
AGCCCTGCCGAGTGCCTG

[spacer (SEQ ID NO: 362)] [J43 MP8-2 2003 (SEQ ID NO: 1119) amino acid sequence:

(SEQ ID NO: 1120)
[QGQSGQG][ACRICQDHPATKWNSGGGSSGGSISSGLLSGRSANPRGGGS
YELTQPPSASVNVGETVKITCSGDQLPKYFADWFHQRSDQTILQVIYDDN
KRPSGIPERISGSSSGTTATLTIRDVRAEDEGDYYCFSGYVDSDSKLYVF
GSGTQLTVL]

J43 MP8-2 2003 amino acid sequence:

(SEQ ID NO: 1119)
ACRICQDHPATKWNSGGGSSGGSISSGLLSGRSANPRGGGSYELTQPPSA
SVNVGETVKITCSGDQLPKYFADWFHQRSDQTILQVIYDDNKRPSGIPER
ISGSSSGTTATLTIRDVRAEDEGDYYCFSGYVDSDSKLYVFGSGTQLTVL

[spacer (SEQ ID NO: 918)] [J43 MP8-2 2003 (SEQ ID NO: 1121) nucleotide sequence:

(SEQ ID NO: 1122)
[CAAGGCCAGTCTGGCCAAGGT][GCGTGCCGTATTTGTCAGGATCATCC
TGCGACGAAGTGGAATTCTGGAGGTGGCTCGAGCGGCGGCTCTATCTCTT
CCGGACTGCTGTCCGGCAGATCCGCCAATCCTCGTGGCGGAGGATCCTAC
GAGCTGACCCAGCCTCCTAGCGCCTCCGTGAATGTGGGCGAGACAGTGAA
GATCACCTGTAGCGGCGACCAGCTGCCCAAGTACTTCGCCGACTGGTTCC
ACCAGCGGAGCGACCAGACAATCCTGCAAGTGATCTACGACGACAACAAG
CGGCCCAGCGGCATCCCCGAGAGAATCAGCGGAAGCAGCAGCGGCACCAC
CGCCACCCTGACCATTAGAGATGTGCGGGCCGAGGACGAGGGCGACTACT
ACTGCTTTAGCGGCTACGTGGACAGCGACAGCAAGCTGTACGTGTTCGGC
TCCGGTACCCAGCTGACAGTGCTG]

[spacer (SEQ ID NO: 362)] [J43 MP8-2 2005 (SEQ ID NO: 1123) amino acid sequence:

(SEQ ID NO: 1124)
[QGQSGQG][ACRICQDHPATKWNSGGGSSGGAVGLLAPPSGRSANPRGG
GSYELTQPPSASVNVGETVKITCSGDQLPKYFADWFHQRSDQTILQVIYD
DNKRPSGIPERISGSSSGTTATLTIRDVRAEDEGDYYCFSGYVDSDSKLY
VFGSGTQLTVL]

J43 MP8-2 2005 amino acid sequence:

(SEQ ID NO: 1123)
ACRICQDHPATKWNSGGGSSGGAVGLLAPPSGRSANPRGGGSYELTQPPS
ASVNVGETVKITCSGDQLPKYFADWFHQRSDQTILQVIYDDNKRPSGIPE
RISGSSSGTTATLTIRDVRAEDEGDYYCFSGYVDSDSKLYVFGSGTQLTV
L

[spacer (SEQ ID NO: 362)] [J43 MP8-2 2008 (SEQ ID NO: 1127) amino acid sequence:

(SEQ ID NO: 1128)
[QGQSGQG][ACRICQDHPATKWNSGGGSSGGSISSGLLSGRSDGHGGGS
YELTQPPSASVNVGETVKITCSGDQLPKYFADWFHQRSDQTILQVIYDDN
KRPSGIPERISGSSSGTTATLTIRDVRAEDEGDYYCFSGYVDSDSKLYVF
GSGTQLTVL]

J43 MP8-2 2008 amino acid sequence:

(SEQ ID NO: 1127)

ACRICQDHPATKWNSGGGSSGGSISSGLLSGRSDGHGGGSYELTQPPSAS
VNVGETVKITCSGDQLPKYFADWFHQRSDQTILQVIYDDNKRPSGIPERI
SGSSSGTTATLTIRDVRAEDEGDYYCFSGYVDSDSKLYVFGSGTQLTVL

[spacer (SEQ ID NO: 918)] [J43 MP8-2 2008 (SEQ ID NO: 1129) nucleotide sequence:

(SEQ ID NO: 1130)

[CAAGGCCAGTCTGGCCAAGGT][GCGTGCCGTATTTGTCAGGATCATCC
TGCGACGAAGTGGAATTCTGGAGGTGGCTCGAGCGGCGGCTCTATCTCTT
CCGGACTGCTGTCCGGCAGATCCGACCAGCACGGCGGAGGATCCTACGA
GCTGACCCAGCCTCCTAGCGCCTCCGTGAATGTGGGCGAGACAGTGAAG
ATCACCTGTAGCGGCGACCAGCTGCCCAAGTACTTCGCCGACTGGTTCC
ACCAGCGGAGCGACCAGACAATCCTGCAAGTGATCTACGACGACAACA
AGCGGCCCAGCGGCATCCCCGAGAGAATCAGCGGAAGCAGCAGCGGC
ACCACCGCCACCCTGACCATTAGAGATGTGCGGGCCGAGGACGAGGG
CGACTACTACTGCTTTAGCGGCTACGTGGACAGCGACAGCAAGCTGTAC
GTGTTCGGCTCCGGTACCCAGCTGACAGTGCTG]

[spacer (SEQ ID NO: 362)] [J43 MP8-2 2001 (SEQ ID NO: 1131)] amino acid sequence:

(SEQ ID NO: 1132)

[QGQSGQG][ACRICQDHPATKWNSGGGSSGGSISSGLLSGRSANPGGG
SYELTQPPSASVNVGETVKITCSGDQLPKYFADWFHQRSDQTILQVIYDD
NKRPSGIPERISGSSSGTTATLTIRDVRAEDEGDYYCFSGYVDSDSKLYV
FGSGTQLTVL]

J43 MP8-2 2012 amino acid sequence:

(SEQ ID NO: 1131)

ACRICQDHPATKWNSGGGSSGGSISSGLLSGRSANPGGGSYELTQPPSAS
VNVGETVKITCSGDQLPKYFADWFHQRSDQTILQVIYDDNKRPSGIPERI
SGSSSGTTATLTIRDVRAEDEGDYYCFSGYVDSDSKLYVFGSGTQLTVL

[spacer (SEQ ID NO: 918)] [J43 MP8-2 2012 (SEQ ID NO: 1132) nucleotide sequence:

(SEQ ID NO: 1133)

[CAAGGCCAGTCTGGCCAAGGT][GCGTGCCGTATTTGTCAGGATCATC
CTGCGACGAAGTGGAATTCTGGAGGTGGCTCGAGCGGCGGCTCTATC
TCTTCCGGACTGCTGTCCGGCAGATCCGCTAATCCCGGCGGAGGA
TCCTACGAGCTGACCCAGCCTCCTAGCGCCTCCGTGAATGTGGGCGAGA
CAGTGAAGATCACCTGTAGCGGCGACCAGCTGCCCAAGTACTTCGCCGA
CTGGTTCCACCAGCGGAGCGACCAGACAATCCTGCAAGTGATCTACGAC
GACAACAAGCGGCCCAGCGGCATCCCCGAGAGAATCAGCGGAAGCAGCA
GCGGCACCACCGCCACCCTGACCATTAGAGATGTGCGGGCCGAGGACGA
GGGCGACTACTACTGCTTTAGCGGCTACGTGGACAGCGACAGCAAGCTG
TACGTGTTCGGCTCCGGTACCCAGCTGACAGTGCTG]

[spacer (SEQ ID NO: 362)] [J43 MP8-2 2011 (SEQ ID NO: 1134) amino acid sequence:

(SEQ ID NO: 1135)

[QGQSGQG][ACRICQDHPATKWNSGGGSSGGSISSGLLSGRSDNP
GGGSYELTQPPSASVNVGETVKITCSGDQLPKYFADWFHQRSDQTI
LQVIYDDNKRPSGIPERISGSSSGTTATLTIRDVRAEDEGDYYCFSGYV
DSDSKLYVFGSGTQLTVL]

J43 MP8-2 2011 amino acid sequence:

(SEQ ID NO: 1134)

ACRICQDHPATKWNSGGGSSGGSISSGLLSGRSDNPGGGSYELTQPPSAS
VNVGETVKITCSGDQLPKYFADWFHQRSDQTILQVIYDDNKRPSGIPERI
SGSSSGTTATLTIRDVRAEDEGDYYCFSGYVDSDSKLYVFGSGTQLTVL

[spacer (SEQ ID NO: 918)] [J43 MP8-2 2011 (SEQ ID NO: 1136) nucleotide sequence:

(SEQ ID NO: 1137)

[CAAGGCCAGTCTGGCCAAGGT][GCGTGCCGTATTTGTCAGGATCA
TCCTGCGACGAAGTGGAATTCTGGAGGTGGCTCGAGCGGCGGCTC
TATCTCTTCCGGACTGCTGTCCGGCAGATCCGACAATCCCGGCGGAGGA
TCCTACGAGCTGACCCAGCCTCCTAGCGCCTCCGTGAATGTGGGCGAGA
CAGTGAAGATCACCTGTAGCGGCGACCAGCTGCCCAAGTACTTCGCCGA
CTGGTTCCACCAGCGGAGCGACCAGACAATCCTGCAAGTGATCTACGAC
GACAACAAGCGGCCCAGCGGCATCCCCGAGAGAATCAGCGGAAGCAGCA
GCGGCACCACCGCCACCCTGACCATTAGAGATGTGCGGGCCGAGGACGA
GGGCGACTACTACTGCTTTAGCGGCTACGTGGACAGCGACAGCAAGCTG
TACGTGTTCGGCTCCGGTACCCAGCTGACAGTGCTG]

### Example 17

### Activatable Anti-Mouse PD-1 J43 Antibodies Reduce Incidence of Diabetes in NOD Mice

[0885] In this Example, anti-PD-1 J43 activatable antibodies were analyzed for the ability to protect from anti-PD-1 induction of diabetes in NOD mice. The NOD mice, substrain NOD/ShiLtJ, were obtained from Jackson Laboratory at 8 weeks and acclimated on site for 2 weeks. At 10 weeks, mice were checked for diabetes prior to enrollment, grouped, and dosed as set forth in Table 4.

TABLE 4
Dosing regimen

| | | | | | Dose | | |
|---|---|---|---|---|---|---|---|
| | | | | Dose | volume | | |
| Group | Count | Gender | Treatment | (mg/kg) | (mL/kg) | Schedule | Route |
| 1 | 7 | F | mIgG2a (C1.18.4) | 10 | 10 | q7dx1 | IP |
| 2 | 7 | F | Anti-PD-1 J43 m2a | 10 | 10 | q7dx1 | IP |
| 3 | 7 | F | Anti-PD-1 J43 m2a | 3 | 10 | q7dx1 | IP |
| 4 | 7 | F | Anti-PD-1 J43 m2a | 1 | 10 | q7dx1 | IP |
| 5 | 7 | F | J43 MP7-1 2001 m2a | 10 | 10 | q7dx1 | IP |
| 6 | 7 | F | J43 MP7-1 2001 m2a | 3 | 10 | q7dx1 | IP |
| 7 | 7 | F | J43 MP8-2 2001 m2a | 10 | 10 | q7dx1 | IP |
| 8 | 7 | F | J43 MP8-2 2001 m2a | 3 | 10 | q7dx1 | IP |

[0886] FIG. 24 which plots % non-diabetic versus number of days post dose, shows that anti-PD-1 J43 antibody induced diabetes in NOD mice with increased frequency as dosage increased. At day fourteen post dose, the percentage of non-diabetic mice for the antibody-treated groups was 14%, 43% and 71% for the 20 mg/kg, 3 mg/kg and 1 mg/kg dose groups, respectively. Activatable antibodies J43 MP7-1 2001 m2a and J43 MP8-2 2001 m2a required increased doses to induce diabetes at frequencies comparable to the parental antibody. At day fourteen post dose with J43 MP7-1 2001 m2a, 57% of the 20 mg/kg group remained non-diabetic and all of the 3 mg/kg were non-diabetic. At day fourteen post dose with J43 MP8-2 2001 m2a, 71% of the 20 mg/kg group and 86% of the 3 mg/kg group remained non-diabetic.

### Example 18

### Evaluation of Efficiency of Masking Moieties

[0887] This example describes additional activatable anti-PD-1 antibodies that exhibit reduced binding to hPD-1.

[0888] Examples of additional activatable antibodies of the disclosure comprising anti-PD1 antibody A1.5 and a variety of mask and substrate combinations were produced using techniques as described herein. The amino acid and nucleic acid sequences of these activatable anti-PD-1 antibody variable domains of the disclosure are provided below. Antibodies were produced as hIgG4 containing a single amino acid substitution, S228P (Angal, et al. 1993. Mol Immunol 30:105-8.) HC and hK LC format.

[0889] Masking efficiencies of several of these activatable antibodies were determined as described herein. The results are shown in FIGS. 25A and 25B.

[0890] In some embodiments, the activatable antibody also includes a spacer sequence. In some embodiments, the spacer is joined directly to the MM of the activatable antibody. In some embodiments, the spacer is joined directly to the MM of the activatable antibody in the structural arrangement from N-terminus to C-terminus of spacer-MM-CM-AB. In some embodiments, the spacer joined directly to the N-terminus of MM of the activatable antibody is selected from the group consisting of QGQSGQG (SEQ ID NO: 362), QGQSGQ (SEQ ID NO: 913), QGQSG (SEQ ID NO: 914), QGQS (SEQ ID NO: 915), QGQ (SEQ ID NO: 916), QG (SEQ ID NO: 917), and Q. In some embodiments, the spacer includes at least the amino acid sequence QGQSGQG (SEQ ID NO: 362). In some embodiments, the spacer includes at least the amino acid sequence QGQSGQ (SEQ ID NO: 913). In some embodiments, the spacer includes at least the amino acid sequence QGQSG (SEQ ID NO: 914). In some embodiments, the spacer includes at least the amino acid sequence QGQS (SEQ ID NO: 915), In some embodiments, the spacer includes at least the amino acid sequence QGQ (SEQ ID NO: 916). In some embodiments, the spacer includes at least the amino acid sequence QG (SEQ ID NO: 917). In some embodiments, the spacer includes at least the amino acid residue Q. In some embodiments, the activatable antibody does not include a spacer sequence. Additional examples of spacers include GQSGQG (SEQ ID NO: 2042), QSGQG (SEQ ID NO: 2043), SGQG (SEQ ID NO: 2044), GQG (SEQ ID NO: 2045), QG (SEQ ID NO: 2046), and G.

[0891] While the sequences shown below include the spacer sequence of SEQ ID NO: 362, those of ordinary skill in the art appreciate that the activatable anti-PD-1 antibodies of the disclosure can include any suitable spacer sequence, such as, for example, a spacer sequence selected from the group consisting of QGQSGQG (SEQ ID NO: 362), QGQSGQ (SEQ ID NO: 913), QGQSG (SEQ ID NO: 914), QGQS (SEQ ID NO: 915), QGQ (SEQ ID NO: 916), QG (SEQ ID NO: 917), and Q. Additional examples of spacers include GQSGQG (SEQ ID NO: 2042), QSGQG (SEQ ID NO: 2043), SGQG (SEQ ID NO: 2044), GQG (SEQ ID NO: 2045), QG (SEQ ID NO: 2046), and G While the sequences shown below include the spacer sequence of SEQ ID NO: 362, those of ordinary skill in the art will also appreciate that activatable anti-PD-1 antibodies of the disclosure in some embodiments do not include a spacer sequence.

[spacer (SEQ ID NO: 362)] [PD1 1.5 PD01 2003 (SEQ ID NO: 1138) amino acid sequence:

(SEQ ID NO: 1139)

[QGQSGQG][AMSGCSWSAFCPYLAGGGSSGGSISSGLLSGRSANPR
GGGSDIQLTQSPSSLSASVGDRVTITCRASESVDAYGISFMNWFQ
QKPGKAPKLLIYAASNQGSGVPSRFSGSGSGTDFTLTISSMQPEDFATY
YCQQSKDVPWTFGQGTKLEIK]

PD1 1.5 PD01 2003 amino acid sequence:

(SEQ ID NO: 1138)

AMSGCSWSAFCPYLAGGGSSGGSISSGLLSGRSANPRGGGSDIQLTQSPS
SLSASVGDRVTITCRASESVDAYGISFMNWFQQKPGKAPKLLIYAASNQG
SGVPSRFSGSGSGTDFTLTISSMQPEDFATYYCQQSKDVPWTFGQGTKLE
IK

[spacer (SEQ ID NO: 918)] [PD1 1.5 PD001 2003 (SEQ ID NO: 1141)] nucleotide sequence:

(SEQ ID NO: 1142)

[CAAGGCCAGTCTGGCCAAGGT][GCGATGAGTGGGTGCTCGTGGT
CTGCTTTTTGCCCGTATTTGGCGGGAGGTGGCTCGAGCGGCGGCTC
TATCTCTTCCGGACTGCTGTCCGGCAGATCCGCCAATCCTCGTGGCGGA
GGATCCGATATCCAGCTGACCCAGAGCCCTAGCAGCCTGTCTGCCAGCG
TGGGCGACAGAGTGACCATCACCTGTAGAGCCAGCGAGAGCGTGGACGC
TTACGGCATCAGCTTCATGAACTGGTTCCAGCAGAAGCCCGGCAAGGCC
CCCAAGCTGCTGATCTACGCCGCCAGCAATCAGGGCAGCGGCGTGCCAA
GCAGATTTTCCGGCTCTGGCAGCGGCACCGACTTCACCCTGACCATCAG
CAGCATGCAGCCCGAGGACTTCGCCACCTACTACTGCCAGCAGAGCAAG
GACGTGCCCTGGACCTTTGGCCAGGGTACCAAGCTGGAAATCAAG]

[spacer (SEQ ID NO: 362)] [PD1 1.5 PD01 2012 (SEQ ID NO: 1144) amino acid sequence:

(SEQ ID NO: 1143)

[QGQSGQG][AMSGCSWSAFCPYLGGGSSGGSISSGLLSGRSANPGG
GSDIQLTQSPSSLSASVGDRVTITCRASESVDAYGISFMNWFQQK
PGKAPKLLIYAASNQGSGVPSRFSGSGSGTDFTLTISSMQPEDFATYYC
QQSKDVPWTFGQGTKLEIK]

PD1 1.5 PD01 2012 amino acid sequence:

(SEQ ID NO: 1144)

AMSGCSWSAFCPYLGGGSSGGSISSGLLSGRSANPGGGSDIQLTQSPSSL
SASVGDRVTITCRASESVDAYGISFMNWFQQKPGKAPKLLIYAASNQGSG
VPSRFSGSGSGTDFTLTISSMQPEDFATYYCQQSKDVPWTFGQGTKLEIK

[spacer (SEQ ID NO: 918)] [PD1 1.5 PD01 2012 (SEQ ID NO: 1145)] nucleotide sequence:

(SEQ ID NO: 1146)

[CAAGGCCAGTCTGGCCAAGGT][GCGATGAGTGGGTGCTCGTGGTC
TGCTTTTTGCCCGTATTTGGCGGGAGGTGGCTCGAGCGGCGGCTC
TATCTCTTCCGGACTGCTGTCCGGCAGATCCGCTAATCCCGGCGGAGGA
TCCGATATCCAGCTGACCCAGAGCCCTAGCAGCCTGTCTGCCAGCGTGG
GCGACAGAGTGACCATCACCTGTAGAGCCAGCGAGAGCGTGGACGCTTA
CGGCATCAGCTTCATGAACTGGTTCCAGCAGAAGCCCGGCAAGGCCCCC
AAGCTGCTGATCTACGCCGCCAGCAATCAGGGCAGCGGCGTGCCAAGCA
GATTTTCCGGCTCTGGCAGCGGCACCGACTTCACCCTGACCATCAGCAG
CATGCAGCCCGAGGACTTCGCCACCTACTACTGCCAGCAGAGCAAGGAC
GTGCCCTGGACCTTTGGCCAGGGTACCAAGCTGGAAATCAAG]

[spacer (SEQ ID NO: 362)] [PD1 1.5 PD01 2011 (SEQ ID NO: 1148) amino acid sequence:

(SEQ ID NO: 1147)

[QGQSGQG][AMSGCSWSAFCPYLGGGSSGGSISSGLLSGRSDNPG
GGSDIQLTQSPSSLSASVGDRVTITCRASESVDAYGISFMNWFQQK
PGKAPKLLIYAASNQGSGVPSRFSGSGSGTDFTLTISSMQPEDFATYYC
QQSKDVPWTFGQGTKLEIK]

PD1 1.5 PD01 2011 amino acid sequence:

(SEQ ID NO: 1148)

AMSGCSWSAFCPYLGGGSSGGSISSGLLSGRSDNPGGGSDIQLTQSPSSL
SASVGDRVTITCRASESVDAYGISFMNWFQQKPGKAPKLLIYAASNQGSG
VPSRFSGSGSGTDFTLTISSMQPEDFATYYCQQSKDVPWTFGQGTKLEIK

[spacer (SEQ ID NO: 918)] [PD1 1.5 PD01 2011 (SEQ ID NO: 1149)] nucleotide sequence:

(SEQ ID NO: 1150)

[CAAGGCCAGTCTGGCCAAGGT][GCGATGAGTGGGTGCTCGTGGTCTGC
TTTTTGCCCGTATTTGGCGGGAGGTGGCTCGAGCGGCGGCTCTATCTCTT
CCGGACTGCTGTCCGGCAGATCCGACAATCCCGGCGGAGGATCCGATATC
CAGCTGACCCAGAGCCCTAGCAGCCTGTCTGCCAGCGTGGGCGACAGAGT
GACCATCACCTGTAGAGCCAGCGAGAGCGTGGACGCTTACGGCATCAGCT
TCATGAACTGGTTCCAGCAGAAGCCCGGCAAGGCCCCCAAGCTGCTGATC
TACGCCGCCAGCAATCAGGGCAGCGGCGTGCCAAGCAGATTTTCCGGCTC
TGGCAGCGGCACCGACTTCACCCTGACCATCAGCAGCATGCAGCCCGAGG
ACTTCGCCACCTACTACTGCCAGCAGAGCAAGGACGTGCCCTGGACCTTT
GGCCAGGGTACCAAGCTGGAAATCAAG]

[spacer (SEQ ID NO: 362)] [PD1 1.5 PD34 2001 (SEQ ID NO: 1152) amino acid sequence:

(SEQ ID NO: 1151)

[QGQSGQG][TSYCSIEHYPCNTHHGGGSSGGSISSGLLSGRSDNHGGGS
DIQLTQSPSSLSASVGDRVTITCRASESVDAYGISFMNWFQQKPGKAPKL
LIYAASNQGSGVPSRFSGSGSGTDFTLTISSMQPEDFATYYCQQSKDVPW
TFGQGTKLEIK]

PD1 1.5 PD34 2001 amino acid sequence:

(SEQ ID NO: 1152)

TSYCSIEHYPCNTHHGGGSSGGSISSGLLSGRSDNHGGGSDIQLTQSPSS
LSASVGDRVTITCRASESVDAYGISFMNWFQQKPGKAPKLLIYAASNQGS
GVPSRFSGSGSGTDFTLTISSMQPEDFATYYCQQSKDVPWTFGQGTKLEI
K

[spacer (SEQ ID NO: 1125)] [PD1 1.5 PD034 2001 (SEQ ID NO: 1153)] nucleotide sequence:

(SEQ ID NO: 1154)

[CAGGGGCAATCTGGCCAGGGG][ACGTCTTACTGCAGTATTGAGCATTA
CCCCTGCAATACACATCATGGAGGTGGCTCGAGCGGCGGCTCTATCTCTT
CCGGACTGCTGTCCGGCAGATCCGACAATCACGGCGGAGGATCCGATATC
CAGCTGACCCAGAGCCCTAGCAGCCTGTCTGCCAGCGTGGGCGACAGAGT
GACCATCACCTGTAGAGCCAGCGAGAGCGTGGACGCTTACGGCATCAGCT
TCATGAACTGGTTCCAGCAGAAGCCCGGCAAGGCCCCCAAGCTGCTGATC
TACGCCGCCAGCAATCAGGGCAGCGGCGTGCCAAGCAGATTTTCCGGCTC
TGGCAGCGGCACCGACTTCACCCTGACCATCAGCAGCATGCAGCCCGAGG
ACTTCGCCACCTACTACTGCCAGCAGAGCAAGGACGTGCCCTGGACCTTT
GGCCAGGGTACCAAGCTGGAAATCAAG]

[spacer (SEQ ID NO: 362)] [PD1 1.5 PD34 1004/GG/0001 (SEQ ID NO: 1156) amino acid sequence:

(SEQ ID NO: 1155)

[QGQSGQG][TSYCSIEHYPCNTHHGGGSSGGSAVGLLAPPGGLSGRSDN
HGGGSDIQLTQSPSSLSASVGDRVTITCRASESVDAYGISFMNWFQQKPG
KAPKLLIYAASNQGSGVPSRFSGSGSGTDFTLTISSMQPEDFATYYCQQS
KDVPWTFGQGTKLEIK]

PD1 1.5 PD34 1004/GG/0001 amino acid sequence:

(SEQ ID NO: 1156)

TSYCSIEHYPCNTHHGGGSSGGSAVGLLAPPGGLSGRSDNHGGGSDIQLT
QSPSSLSASVGDRVTITCRASESVDAYGISFMNWFQQKPGKAPKLLIYAA
SNQGSGVPSRFSGSGSGTDFTLTISSMQPEDFATYYCQQSKDVPWTFGQG
TKLEIK

[spacer (SEQ ID NO: 362)] [PD1 1.5 PD34 2005 (SEQ ID NO: 1160) amino acid sequence:

(SEQ ID NO: 1159)

[QGQSGQG][TSYCSIEHYPCNTHHGGGSSGGSAVGLLAPPSGRSANPRG
GGGSDIQLTQSPSSLSASVGDRVTITCRASESVDAYGISFMNWFQQKPGK
APKLLIYAASNQGSGVPSRFSGSGSGTDFTLTISSMQPEDFATYYCQQSK
DVPWTFGQGTKLEIK]

PD1 1.5 PD34 2005 amino acid sequence:

(SEQ ID NO: 1160)

TSYCSIEHYPCNTHHGGGSSGGSAVGLLAPPSGRSANPRGGGGSDIQLTQ
SPSSLSASVGDRVTITCRASESVDAYGISFMNWFQQKPGKAPKLLIYAAS
NQGSGVPSRFSGSGSGTDFTLTISSMQPEDFATYYCQQSKDVPWTFGQGT
KLEIK

[spacer (SEQ ID NO: 362)] [PD1 1.5 PD34 2010 (SEQ ID NO: 1164) amino acid sequence:

(SEQ ID NO: 1163)

[QGQSGQG][TSYCSIEHYPCNTHHGGGSSGGSISSGLLSGRSDYHGGGS
DIQLTQSPSSLSASVGDRVTITCRASESVDAYGISFMNWFQQKPGKAPKL
LIYAASNQGSGVPSRFSGSGSGTDFTLTISSMQPEDFATYYCQQSKDVPW
TFGQGTKLEIK]

PD1 1.5 PD34 2010 amino acid sequence:

(SEQ ID NO: 1164)

TSYCSIEHYPCNTHHGGGSSGGSISSGLLSGRSDYHGGGSDIQLTQSPSS
LSASVGDRVTITCRASESVDAYGISFMNWFQQKPGKAPKLLIYAASNQGS
GVPSRFSGSGSGTDFTLTISSMQPEDFATYYCQQSKDVPWTFGQGTKLEI
K

[spacer (SEQ ID NO: 362)] [PD1 1.5 PD34 2014 (SEQ ID NO: 1168) amino acid sequence:

(SEQ ID NO: 1167)

[QGQSGQG][TSYCSIEHYPCNTHHGGGSSGGSISSGLLSGRSDNIGGGS
DIQLTQSPSSLSASVGDRVTITCRASESVDAYGISFMNWFQQKPGKAPKL
LIYAASNQGSGVPSRFSGSGSGTDFTLTISSMQPEDFATYYCQQSKDVPW
TFGQGTKLEIK]

PD1 1.5 PD34 2014 amino acid sequence:

(SEQ ID NO: 1168)

TSYCSIEHYPCNTHHGGGSSGGSISSGLLSGRSDNIGGGSDIQLTQSPSS
LSASVGDRVTITCRASESVDAYGISFMNWFQQKPGKAPKLLIYAASNQGS
GVPSRFSGSGSGTDFTLTISSMQPEDFATYYCQQSKDVPWTFGQGTKLEI
K

[spacer (SEQ ID NO: 362)] [PD1 1.5 PD34 2003 (SEQ ID NO: 1170) amino acid sequence:

(SEQ ID NO: 1171)

[QGQSGQG][TSYCSIEHYPCNTHHGGGSSGGSISSGLLSGRSANPRGGG
SDIQLTQSPSSLSASVGDRVTITCRASESVDAYGISFMNWFQQKPGKAPK
LLIYAASNQGSGVPSRFSGSGSGTDFTLTISSMQPEDFATYYCQQSKDVP
WTFGQGTKLEIK]

PD1 1.5 PD34 2003 amino acid sequence:

(SEQ ID NO: 1170)

TSYCSIEHYPCNTHHGGGSSGGSISSGLLSGRSANPRGGGSDIQLTQSPS
SLSASVGDRVTITCRASESVDAYGISFMNWFQQKPGKAPKLLIYAASNQG
SGVPSRFSGSGSGTDFTLTISSMQPEDFATYYCQQSKDVPWTFGQGTKLE
IK

[spacer (SEQ ID NO: 1125)] [PD1 1.5 PD034 2003 (SEQ ID NO: 1172)] nucleotide sequence:

(SEQ ID NO: 1173)

[CAGGGGCAATCTGGCCAGGGG][ACGTCTTACTGCAGTATTGAGCATTA
CCCCTGCAATACACATCATGGAGGTGGCTCGAGCGGCGGCTCTATCTCTT
CCGGACTGCTGTCCGGCAGATCCGCCAATCCTCGTGGCGGAGGATCCGAT
ATCCAGCTGACCCAGAGCCCTAGCAGCCTGTCTGCCAGCGTGGGCGACAG
AGTGACCATCACCTGTAGAGCCAGCGAGAGCGTGGACGCTTACGGCATCA
GCTTCATGAACTGGTTCCAGCAGAAGCCCGGCAAGGCCCCCAAGCTGCTG
ATCTACGCCGCCAGCAATCAGGGCAGCGGCGTGCCAAGCAGATTTTCCGG
CTCTGGCAGCGGCACCGACTTCACCCTGACCATCAGCAGCATGCAGCCCG
AGGACTTCGCCACCTACTACTGCCAGCAGAGCAAGGACGTGCCCTGGACC
TTTGGCCAGGGTACCAAGCTGGAAATCAAG]

[spacer (SEQ ID NO: 362)] [PD1 1.5 PD34 2006 (SEQ ID NO: 1174) amino acid sequence:

(SEQ ID NO: 1175)

[QGQSGQG][TSYCSIEHYPCNTHHGGGSSGGSISSGLLSGRSDDHGGGS
DIQLTQSPSSLSASVGDRVTITCRASESVDAYGISFMNWFQQKPGKAPKL
LIYAASNQGSGVPSRFSGSGSGTDFTLTISSMQPEDFATYYCQQSKDVPW
TFGQGTKLEIK]

PD1 1.5 PD34 2006 amino acid sequence:

(SEQ ID NO: 1174)

TSYCSIEHYPCNTHHGGGSSGGSISSGLLSGRSDDHGGGSDIQLTQSPSS
LSASVGDRVTITCRASESVDAYGISFMNWFQQKPGKAPKLLIYAASNQGS
GVPSRFSGSGSGTDFTLTISSMQPEDFATYYCQQSKDVPWTFGQGTKLEI
K

[spacer (SEQ ID NO: 1125)] [PD1 1.5 PD034 2006 (SEQ ID NO: 1176)] nucleotide sequence:

(SEQ ID NO: 1177)

[CAGGGGCAATCTGGCCAGGGG][ACGTCTTACTGCAGTATTGAGCATTA
CCCCTGCAATACACATCATGGAGGTGGCTCGAGCGGCGGCTCTATCTCTT
CCGGACTGCTGTCCGGCAGATCCGACGATCACGGCGGAGGATCCGATATC
CAGCTGACCCAGAGCCCTAGCAGCCTGTCTGCCAGCGTGGGCGACAGAGT
GACCATCACCTGTAGAGCCAGCGAGAGCGTGGACGCTTACGGCATCAGCT
TCATGAACTGGTTCCAGCAGAAGCCCGGCAAGGCCCCCAAGCTGCTGATC
TACGCCGCCAGCAATCAGGGCAGCGGCGTGCCAAGCAGATTTTCCGGCTC
TGGCAGCGGCACCGACTTCACCCTGACCATCAGCAGCATGCAGCCCGAGG
ACTTCGCCACCTACTACTGCCAGCAGAGCAAGGACGTGCCCTGGACCTTT
GGCCAGGGTACCAAGCTGGAAATCAAG]

[spacer (SEQ ID NO: 362)] [PD1 1.5 PD34 2007 (SEQ ID NO: 1178) amino acid sequence:

(SEQ ID NO: 1179)

[QGQSGQG][TSYCSIEHYPCNTHHGGGSSGGSISSGLLSGRSDIHGGGS
DIQLTQSPSSLSASVGDRVTITCRASESVDAYGISFMNWFQQKPGKAPKL
LIYAASNQGSGVPSRFSGSGSGTDFTLTISSMQPEDFATYYCQQSKDVPW
TFGQGTKLEIK]

PD1 1.5 PD34 2007 amino acid sequence:

(SEQ ID NO: 1178)

TSYCSIEHYPCNTHHGGGSSGGSISSGLLSGRSDIHGGGSDIQLTQSPSS
LSASVGDRVTITCRASESVDAYGISFMNWFQQKPGKAPKLLIYAASNQGS
GVPSRFSGSGSGTDFTLTISSMQPEDFATYYCQQSKDVPWTFGQGTKLEI
K

[spacer (SEQ ID NO: 1125)] [PD1 1.5 PD034 2007 (SEQ ID NO: 1180)] nucleotide sequence:

(SEQ ID NO: 1181)

[CAGGGGCAATCTGGCCAGGGG][ACGTCTTACTGCAGTATTGAGCATTA
CCCCTGCAATACACATCATGGAGGTGGCTCGAGCGGCGGCTCTATCTCTT
CCGGACTGCTGTCCGGCAGATCCGACATTCACGGCGGAGGATCCGATATC
CAGCTGACCCAGAGCCCTAGCAGCCTGTCTGCCAGCGTGGGCGACAGAGT
GACCATCACCTGTAGAGCCAGCGAGAGCGTGGACGCTTACGGCATCAGCT
TCATGAACTGGTTCCAGCAGAAGCCCGGCAAGGCCCCCAAGCTGCTGATC
TACGCCGCCAGCAATCAGGGCAGCGGCGTGCCAAGCAGATTTTCCGGCTC
TGGCAGCGGCACCGACTTCACCCTGACCATCAGCAGCATGCAGCCCGAGG
ACTTCGCCACCTACTACTGCCAGCAGAGCAAGGACGTGCCCTGGACCTTT
GGCCAGGGTACCAAGCTGGAAATCAAG]

[spacer (SEQ ID NO: 362)] [PD1 1.5 PD34 2009 (SEQ ID NO: 1182) amino acid sequence:

(SEQ ID NO: 1183)

[QGQSGQG][TSYCSIEHYPCNTHHGGGSSGGSISSGLLSGRSDTHGGGS
DIQLTQSPSSLSASVGDRVTITCRASESVDAYGISFMNWFQQKPGKAPKL
LIYAASNQGSGVPSRFSGSGSGTDFTLTISSMQPEDFATYYCQQSKDVPW
TFGQGTKLEIK]

[PD1 1.5 PD34 2009 amino acid sequence:

(SEQ ID NO: 1182)

TSYCSIEHYPCNTHHGGGSSGGSISSGLLSGRSDTHGGGSDIQLTQSPSS
LSASVGDRVTITCRASESVDAYGISFMNWFQQKPGKAPKLLIYAASNQGS
GVPSRFSGSGSGTDFTLTISSMQPEDFATYYCQQSKDVPWTFGQGTKLEI
K

[spacer (SEQ ID NO: 1125)] [PD1 1.5 PD034 2009 (SEQ ID NO: 1184)] nucleotide sequence:

(SEQ ID NO: 1185)

[CAGGGGCAATCTGGCCAGGGG][ACGTCTTACTGCAGTATTGAGCATTA
CCCCTGCAATACACATCATGGAGGTGGCTCGAGCGGCGGCTCTATCTCTT
CCGGACTGCTGTCCGGCAGATCCGACACTCACGGCGGAGGATCCGATATC
CAGCTGACCCAGAGCCCTAGCAGCCTGTCTGCCAGCGTGGGCGACAGAGT
GACCATCACCTGTAGAGCCAGCGAGAGCGTGGACGCTTACGGCATCAGCT
TCATGAACTGGTTCCAGCAGAAGCCCGGCAAGGCCCCCAAGCTGCTGATC
TACGCCGCCAGCAATCAGGGCAGCGGCGTGCCAAGCAGATTTTCCGGCTC
TGGCAGCGGCACCGACTTCACCCTGACCATCAGCAGCATGCAGCCCGAGG
ACTTCGCCACCTACTACTGCCAGCAGAGCAAGGACGTGCCCTGGACCTTT
GGCCAGGGTACCAAGCTGGAAATCAAG]

[spacer (SEQ ID NO: 362)] [PD1 1.5 PD34 2008 (SEQ ID NO: 1186) amino acid sequence:

(SEQ ID NO: 1187)

[QGQSGQG][TSYCSIEHYPCNTHHGGGSSGGSISSGLLSGRSDQHGGGS
DIQLTQSPSSLSASVGDRVTITCRASESVDAYGISFMNWFQQKPGKAPKL
LIYAASNQGSGVPSRFSGSGSGTDFTLTISSMQPEDFATYYCQQSKDVPW
TFGQGTKLEIK]

PD1 1.5 PD34 2008 amino acid sequence:

(SEQ ID NO: 1186)

TSYCSIEHYPCNTHHGGGSSGGSISSGLLSGRSDQHGGGSDIQLTQSPSS
LSASVGDRVTITCRASESVDAYGISFMNWFQQKPGKAPKLLIYAASNQGS
GVPSRFSGSGSGTDFTLTISSMQPEDFATYYCQQSKDVPWTFGQGTKLEI
K

[spacer (SEQ ID NO: 1125)] [PD1 1.5 PD034 2008 (SEQ ID NO: 1188)] nucleotide sequence:

(SEQ ID NO: 1189)

[CAGGGGCAATCTGGCCAGGGG][ACGTCTTACTGCAGTATTGAGCATTA
CCCCTGCAATACACATCATGGAGGTGGCTCGAGCGGCGGCTCTATCTCTT
CCGGACTGCTGTCCGGCAGATCCGACCAGCACGGCGGAGGATCCGATATC
CAGCTGACCCAGAGCCCTAGCAGCCTGTCTGCCAGCGTGGGCGACAGAGT
GACCATCACCTGTAGAGCCAGCGAGAGCGTGGACGCTTACGGCATCAGCT
TCATGAACTGGTTCCAGCAGAAGCCCGGCAAGGCCCCCAAGCTGCTGATC
TACGCCGCCAGCAATCAGGGCAGCGGCGTGCCAAGCAGATTTTCCGGCTC
TGGCAGCGGCACCGACTTCACCCTGACCATCAGCAGCATGCAGCCCGAGG
ACTTCGCCACCTACTACTGCCAGCAGAGCAAGGACGTGCCCTGGACCTTT
GGCCAGGGTACCAAGCTGGAAATCAAG]

[spacer (SEQ ID NO: 362)] [PD1 1.5 PD34 2012 (SEQ ID NO: 1190) amino acid sequence:

(SEQ ID NO: 1191)

[QGQSGQG][TSYCSIEHYPCNTHHGGGSSGGSISSGLLSGRSANPGGGS
DIQLTQSPSSLSASVGDRVTITCRASESVDAYGISFMNWFQQKPGKAPKL
LIYAASNQGSGVPSRFSGSGSGTDFTLTISSMQPEDFATYYCQQSKDVPW
TFGQGTKLEIK]

PD1 1.5 PD34 2012 amino acid sequence:

(SEQ ID NO: 1190)

TSYCSIEHYPCNTHHGGGSSGGSISSGLLSGRSANPGGGSDIQLTQSPSS
LSASVGDRVTITCRASESVDAYGISFMNWFQQKPGKAPKLLIYAASNQGS
GVPSRFSGSGSGTDFTLTISSMQPEDFATYYCQQSKDVPWTFGQGTKLEI
K

[spacer (SEQ ID NO: 1125)] [PD1 1.5 PD034 2012 (SEQ ID NO: 1192)] nucleotide sequence:

(SEQ ID NO: 1193)

[CAGGGGCAATCTGGCCAGGGG][ACGTCTTACTGCAGTATTGAGCAT
TACCCCTGCAATACACATCATGGAGGTGGCTCGAGCGGCGGCTCTATCT
CTTCCGGACTGCTGTCCGGCAGATCCGCTAATCCCGGCGGAGGATCCG
ATATCCAGCTGACCCAGAGCCCTAGCAGCCTGTCTGCCAGCGTGGGCGA
CAGAGTGACCATCACCTGTAGAGCCAGCGAGAGCGTGGACGCTTACGGCA
TCAGCTTCATGAACTGGTTCCAGCAGAAGCCCGGCAAGGCCCCCAAGCTG
CTGATCTACGCCGCCAGCAATCAGGGCAGCGGCGTGCCAAGCAGATTTTC
CGGCTCTGGCAGCGGCACCGACTTCACCCTGACCATCAGCAGCATGCAGC
CCGAGGACTTCGCCACCTACTACTGCCAGCAGAGCAAGGACGTGCCCTGG
ACCTTTGGCCAGGGTACCAAGCTGGAAATCAAG]

[spacer (SEQ ID NO: 362)] [PD1 1.5 PD34 2013 (SEQ ID NO: 1194) amino acid sequence:

(SEQ ID NO: 1195)

[QGQSGQG][TSYCSIEHYPCNTHHGGGSSGGSISSGLLSGRSANIG
GGSDIQLTQSPSSLSASVGDRVTITCRASESVDAYGISFMNWFQQKPGK
APKLLIYAASNQGSGVPSRFSGSGSGTDFTLTISSMQPEDFATYYCQQS
KDVPWTFGQGTKLEIK]

PD1 1.5 PD34 2013 amino acid sequence:

(SEQ ID NO: 1194)

TSYCSIEHYPCNTHHGGGSSGGSISSGLLSGRSANIGGGSDIQLTQSPSS
LSASVGDRVTITCRASESVDAYGISFMNWFQQKPGKAPKLLIYAASNQGS
GVPSRFSGSGSGTDFTLTISSMQPEDFATYYCQQSKDVPWTFGQGTKLEI
K

[spacer (SEQ ID NO: 1125)] [PD1 1.5 PD034 2013 (SEQ ID NO: 1196)] nucleotide sequence:

(SEQ ID NO: 1197)

[CAGGGGCAATCTGGCCAGGGG][ACGTCTTACTGCAGTATTGAGCA
TTACCCCTGCAATACACATCATGGAGGTGGCTCGAGCGGCGGCTCTATC
TCTTCCGGACTGCTGTCCGGCAGATCCGCTAATATTGGCGGAGGATCCG
ATATCCAGCTGACCCAGAGCCCTAGCAGCCTGTCTGCCAGCGTGGGCGA
CAGAGTGACCATCACCTGTAGAGCCAGCGAGAGCGTGGACGCTTACGGCA
TCAGCTTCATGAACTGGTTCCAGCAGAAGCCCGGCAAGGCCCCCAAGCTG
CTGATCTACGCCGCCAGCAATCAGGGCAGCGGCGTGCCAAGCAGATTTTC
CGGCTCTGGCAGCGGCACCGACTTCACCCTGACCATCAGCAGCATGCAGC
CCGAGGACTTCGCCACCTACTACTGCCAGCAGAGCAAGGACGTGCCCTGG
ACCTTTGGCCAGGGTACCAAGCTGGAAATCAAG]

[spacer (SEQ ID NO: 362)] [PD1 1.5 PD34 2011 (SEQ ID NO: 1198) amino acid sequence:

(SEQ ID NO: 1199)

[QGQSGQG][TSYCSIEHYPCNTHHGGGSSGGSISSGLLSGRSDNPG
GGSDIQLTQSPSSLSASVGDRVTITCRASESVDAYGISFMNWFQQKPGK
APKLLIYAASNQGSGVPSRFSGSGSGTDFTLTISSMQPEDFATYYCQQS
KDVPWTFGQGTKLEIK]

PD1 1.5 PD34 2011 amino acid sequence:

(SEQ ID NO: 1198)

TSYCSIEHYPCNTHHGGGSSGGSISSGLLSGRSDNPGGGSDIQLTQSPSS
LSASVGDRVTITCRASESVDAYGISFMNWFQQKPGKAPKLLIYAASNQGS
GVPSRFSGSGSGTDFTLTISSMQPEDFATYYCQQSKDVPWTFGQGTKLEI
K

[spacer (SEQ ID NO: 1125)] [PD1 1.5 PD034 2011 (SEQ ID NO: 1200)] nucleotide sequence:

(SEQ ID NO: 1201)

[CAGGGGCAATCTGGCCAGGGG][ACGTCTTACTGCAGTATTGAGCAT
TACCCCTGCAATACACATCATGGAGGTGGCTCGAGCGGCGGCTCTATCT
CTTCCGGACTGCTGTCCGGCAGATCCGACAATCCCGGCGGAGGATCCGA
TATCCAGCTGACCCAGAGCCCTAGCAGCCTGTCTGCCAGCGTGGGCGAC
AGAGTGACCATCACCTGTAGAGCCAGCGAGAGCGTGGACGCTTACGGCA
TCAGCTTCATGAACTGGTTCCAGCAGAAGCCCGGCAAGGCCCCCAAGCTG
CTGATCTACGCCGCCAGCAATCAGGGCAGCGGCGTGCCAAGCAGATTTTC
CGGCTCTGGCAGCGGCACCGACTTCACCCTGACCATCAGCAGCATGCAGC
CCGAGGACTTCGCCACCTACTACTGCCAGCAGAGCAAGGACGTGCCCTGG
ACCTTTGGCCAGGGTACCAAGCTGGAAATCAAG]

[spacer (SEQ ID NO: 362)] [PD1 1.5 PD006 2003 (SEQ ID NO: 1202) amino acid sequence:

(SEQ ID NO: 1203)

[QGQSGQG][APRCYMFASYCKSQYGGGSSGGSISSGLLSGRSANPRG
GGSDIQLTQSPSSLSASVGDRVTITCRASESVDAYGISFMNWFQQKPGK
APKLLIYAASNQGSGVPSRFSGSGSGTDFTLTISSMQPEDFATYYCQQS
KDVPWTFGQGTKLEIK]

PD1 1.5 PD006 2003 amino acid sequence:

(SEQ ID NO: 1202)

APRCYMFASYCKSQYGGGSSGGSISSGLLSGRSANPRGGGSDIQLTQSPS
SLSASVGDRVTITCRASESVDAYGISFMNWFQQKPGKAPKLLIYAASNQG
SGVPSRFSGSGSGTDFTLTISSMQPEDFATYYCQQSKDVPWTFGQGTKLE
IK

[spacer (SEQ ID NO: 918)] [PD1 1.5 PD006 2003 (SEQ ID NO: 1204)] nucleotide sequence:

(SEQ ID NO: 1205)

[CAAGGCCAGTCTGGCCAAGGT][GCGCCTAGGTGCTATATGTTTGCG
TCGTATTGCAAGAGTCAGTATGGAGGTGGCTCGAGCGGCGGCTCTATCT
CTTCCGGACTGCTGTCCGGCAGATCCGCCAATCCTCGTGGCGGAGGATC
CGATATCCAGCTGACCCAGAGCCCTAGCAGCCTGTCTGCCAGCGTGGGC
GACAGAGTGACCATCACCTGTAGAGCCAGCGAGAGCGTGGACGCTTACG
GCATCAGCTTCATGAACTGGTTCCAGCAGAAGCCCGGCAAGGCCCCCAAG
CTGCTGATCTACGCCGCCAGCAATCAGGGCAGCGGCGTGCCAAGCAGATT
TTCCGGCTCTGGCAGCGGCACCGACTTCACCCTGACCATCAGCAGCATGC
AGCCCGAGGACTTCGCCACCTACTACTGCCAGCAGAGCAAGGACGTGCCC
TGGACCTTTGGCCAGGGTACCAAGCTGGAAATCAAG]

### Example 19

### Activatable Anti-PD1 Nivolumab Masking Moieties

[0892] This example describes identification of masking moieties (MM) that reduce binding of anti-PD1 Nivolumab antibody to its target.

[0893] Anti-PD1 Nivolumab (NV1) (see, e.g., U.S. Pat. No. 8,008,449) was used to screen libraries using a method similar to that described in PCT International Publication Number WO 2010/081173, published 15 Jul. 2010. The screening consisted of one round of MACS and four rounds of FACS sorting. For the initial MACS, approximately 6×10¹¹ cells were incubated with NV1 antibody at a concentration of 100 nM, and approximately 3×10⁷ binders were collected using Protein-A Dynabeads (Life Technologies, Carlsbad, Calif.). FACS rounds were conducted labeling cells with DyLight 650 (Thermo-Fisher) labeled NV1 antibody and collecting cells with strongest fluorescence as follows: 20 nM NV1-650 collecting brightest 13% for FACS round 1 (F1), 2 nM NV1-650 collecting brightest 2% for FACS round 2 (F2-1), 1 nM NV1-650 collecting brightest 1% for FACS round 3 (F3-1b) and 1 nM NV1-650 collecting two populations, the brightest 88% and the brightest 1% for FACS round 4 (F4-1b.1 and F4-1b.2). Individual peptide clones from F4-1b.1 and F4-1b.2 were identified by sequence analysis (Table 19), and selected peptide clones NV01-NV12 were subsequently verified for their ability to bind NV1 (masking moiety NV001 is also referred to herein as NV01 and/or NV-01; masking moiety NV002 is also referred to herein as NV02 and/or NV-02, and so on).

TABLE 19

| Mask | Amino Acid Sequence | SEQ ID NO: |
|---|---|---|
| NV01 | RYCHAANPDRFCGIY | 1206 |
| NV02 | PRVCSTDGGDYCLLP | 1207 |
| NV03 | PRPQCHHRHNCPDHP | 1208 |
| NV04 | KCSRPAHQNPDRCSR | 1209 |
| NV05 | ASYRCPDYKCSHTKH | 1210 |
| NV06 | LPRCPDHPIKCIETK | 1211 |
| NV07 | YTFGCPDRYCDRAAT | 1212 |
| NV08 | RGCPDFNPPSHCYTA | 1213 |
| NV09 | RDYCGPQSPDYCHEI | 1214 |
| NV10 | PNKPCPDLQCYVTNY | 1215 |
| NV11 | PRVACGEPDLCYSNT | 1216 |
| NV12 | RGCKKHTISTLTCPD | 1217 |
| NV13 | PAYRCPDRPPCKNQM | 1218 |
| NV14 | NARCYPYFGDNCHMN | 1220 |
| NV15 | PTLRCPDRWCYDSPR | 1221 |
| NV16 | PSNLCPDKWCQTWRS | 1222 |
| NV17 | TPRYCAASYCPAHGY | 1223 |
| NV18 | RPGCGAVSPRCPDAP | 1224 |
| NV19 | VLRCHKQNPDNCNNH | 1225 |
| NV20 | GVKSCREPDFCSRGS | 1226 |
| NV21 | RNNLCPDYSCNNHNS | 1227 |
| NV22 | RAACHRLNPDACTNG | 1228 |
| NV23 | VCQSDRIPDYVTCTD | 1229 |
| NV24 | RNCRIASINPDYCNI | 1230 |
| NV25 | KEWRCPDYKCKPSYH | 1231 |
| NV26 | NLRICHKSLCPDYIK | 1232 |
| NV27 | NTHKCSNTNICPSFN | 1233 |
| NV28 | STRYCQASQCQMSPY | 1234 |
| NV29 | THRFCTASLCNKNTS | 1235 |
| NV30 | YTLCNTRSPDWCPNK | 1236 |
| NV31 | IRCTTGQSPDYCPQS | 1237 |
| NV32 | RCNQPDKNDQMLCNI | 1238 |
| NV33 | GTCRTDHQSPDYCYY | 1239 |
| NV34 | RGCFRSGDSLGMCPD | 1240 |
| NV35 | SGCFDSNEHRHCSRI | 1241 |
| NV36 | NRCMKLWYNPDCVAR | 1242 |
| NV37 | PLCARPHYWSPCDQS | 1243 |
| NV38 | DSKCHPNSPDYCFNS | 1244 |
| NV39 | NGSCRPLGGDFCGNR | 1245 |
| NV40 | KTRCIEMSGDYCAKS | 1246 |
| NV41 | IRPCMYNWGDLCNQF | 1247 |
| NV42 | VKTCMENNPDYCYNN | 1248 |
| NV43 | LRMCFEASGDYCDQQ | 1249 |
| NV44 | IRKCQLDGPDQCMLT | 1250 |
| NV45 | KWKCHKNNPNYCNNR | 1251 |
| NV46 | RTMCLDTNPDYCQSH | 1252 |
| NV47 | LAACHSMDSHRCPDY | 1253 |
| NV48 | RSPCIHNATMCPDYT | 1254 |
| NV49 | MPRCPDWPPRCSMVI | 1255 |
| NV50 | VRQLCRLPDYCPSGK | 1256 |
| NV51 | PRPPCAQSLNCPDRA | 1257 |
| NV52 | SFGRCTLVRTCPDFM | 1258 |
| NV53 | RDKPCPDFSCATIHY | 1259 |
| NV54 | ATKPCPDRWCTMSTL | 1260 |
| NV55 | SSNRCPDLRCTHHNM | 1261 |
| NV56 | RGSMCPDLHCSLSHI | 1262 |
| NV57 | NYQRCPDRTCMHNII | 1263 |
| NV58 | QKRPCPDRKCHAHYN | 1264 |
| NV59 | QNHRCPDRWCNKTTN | 1265 |
| NV60 | RLNLCPDKHCHMTNL | 1266 |
| NV61 | PQDRCPDKRCTNPGN | 1267 |
| NV62 | SRWRCPDYKCEHGKY | 1268 |
| NV63 | YENQCPDLYCNRYSM | 1269 |
| NV64 | TARSCPVFNCPDNNS | 1270 |
| NV65 | MDQRCPDAWCTSKPK | 1271 |
| NV66 | GDLRCPDRLCPRHSL | 1272 |
| NV67 | IQYLCPDYHCKASNN | 1273 |
| NV68 | QHHRCPDRYCNSNNN | 1274 |
| NV69 | TVALCPDYSCYHINN | 1275 |
| NV70 | SPWRCPDRYCLSNHD | 1276 |
| NV71 | SSKRCPDRFCNKTHA | 1277 |
| NV72 | HTDRCPDYKCSQNHF | 1278 |
| NV73 | SRSNCTPQRCNSDYH | 1279 |
| NV74 | FAARCPDKYCAIHTN | 1280 |
| NV75 | GSARCPDLVCQQTKQ | 1281 |
| NV76 | RNLMCPDKFCNKNTK | 1282 |
| NV77 | NIRLCPDKVCTPTWV | 1283 |
| NV78 | MTDLCPDAHCAKTHM | 1284 |
| NV79 | PYSRLCAYPCPDFVG | 1285 |
| NV80 | LCGCARSPDYCKCRG | 1286 |
| NV81 | WGRCERVPDCCCPRG | 1287 |
| NV82 | TRNTCHTRICYGMAC | 1288 |
| NV83 | CVCTSCSSYWTLCPD | 1289 |
| NV84 | LCCSRGSNCPDRCTW | 1290 |
| NV85 | CCPLCQANMCPDNQS | 1291 |
| NV86 | ECKLCCPDLYCGGTM | 1292 |
| NV87 | CSNPMCAYCCPDLIL | 1293 |
| NV88 | CPRCNTYSKHDCYHQ | 1294 |
| NV89 | FCCASKMPAPSNCHT | 1295 |

### Example 20

### Activatable Anti-PD1 Nivolumab Antibodies

[0894] This example describes examples of activatable anti-PD1 Nivolumab antibodies of the disclosure.

[0895] Activatable anti-PD1 NV1 antibodies comprising an anti-PD1 NV1 masking moiety, a cleavable moiety, and an anti-PD1 NV1 antibody of the disclosure were produced according to methods similar to those described in PCT Publication Nos. WO 2009/025846 and WO 2010/081173. One embodiment of the disclosure is an anti-PD-1 activatable antibody comprising a heavy chain comprising amino acid sequence SEQ ID NO: 1346. One embodiment of the disclosure is an anti-PD-1 activatable antibody comprising a light chain comprising amino acid sequence SEQ ID NO: 626. One embodiment of the disclosure is an anti-PD-1 activatable antibody comprising a heavy chain comprising amino acid sequence SEQ ID NO: 1346 and a light chain comprising amino acid sequence SEQ ID NO: 626. One embodiment of the disclosure is an anti-PD-1 activatable antibody comprising the CDRs of an anti-PD-1 activatable antibody comprising a heavy chain comprising amino acid sequence SEQ ID NO: 1346 and a light chain comprising amino acid sequence SEQ ID NO: 626.

[0896] The amino acid and nucleic acid sequences of several activatable anti-PD1 antibody variable domains of the disclosure are provided below. Antibodies were produced as hIgG4 containing a single amino acid substitution, 5228P (Angal, et al. 1993. Mol Immunol 30:105-8.) HC and hK LC format.

NV1 light chain sequence:

(SEQ ID NO: 626)

EIVLTQSPATLSLSPGERATLSCRASQSVSSYLAWYQQKPGQAPRLLIY
DASNRATGIPARFSGSGSGTDFTLTISSLEPEDFAVYYCQQSSNWPRTF
GQGTKVEIK

[spacer (SEQ ID NO: 362)] [NV1 NV01 2001 (SEQ ID NO: 1296) amino acid sequence:

(SEQ ID NO: 1297)

[QGQSGQG][RYCHAANPDRFCGIYGGGSSGGSISSGLLSGRSDNHGG
SEIVLTQSPATLSLSPGERATLSCRASQSVSSYLAWYQQKPGQAPRLLI
YDASNRATGIPARFSGSGSGTDFTLTISSLEPEDFAVYYCQQSSNWPRT
FGQGTKVEIK]

NV1 NV01 2001 amino acid sequence:

(SEQ ID NO: 1296)

RYCHAANPDRFCGIYGGGSSGGSISSGLLSGRSDNHGGSEIVLTQSPATL
SLSPGERATLSCRASQSVSSYLAWYQQKPGQAPRLLIYDASNRATGIPAR
FSGSGSGTDFTLTISSLEPEDFAVYYCQQSSNWPRTFGQGTKVEIK

[spacer (SEQ ID NO: 918)] [NV1 NV01 2001 (SEQ ID NO: 1298)] nucleotide sequence:

(SEQ ID NO: 1299)

[CAAGGCCAGTCTGGCCAAGGT][CGGTATTGCCATGCTGCGAATCCT
GATCGGTTTTGCGGTATTTATGGAGGTGGCTCGAGCGGCGGCTCTATCT
CTTCCGGACTGCTGTCCGGCAGATCCGACAATCACGGCGGATCCGAGAT
CGTGCTGACACAGAGCCCTGCCACCCTGTCTCTGAGCCCTGGCGAAAGA
GCCACCCTGAGCTGTAGAGCCAGCCAGAGCGTGTCCAGCTACCTGGCCT
GGTATCAGCAGAAGCCCGGCCAGGCTCCCCGGCTGCTGATCTACGATGCC
AGCAATAGAGCCACCGGCATCCCCGCCAGATTTTCCGGCTCTGGCAGCGG
CACCGACTTCACCCTGACCATCAGCTCCCTGGAACCCGAGGACTTCGCCG
TGTACTACTGCCAGCAGAGCAGCAACTGGCCCCGGACATTTGGCCAGGGC
ACCAAGGTGGAAATCAAG]

[spacer (SEQ ID NO: 362)] [NV1 NV02 2001 (SEQ ID NO: 1300) amino acid sequence:

(SEQ ID NO: 1301)

[QGQSGQG][PRVCSTDGGDYCLLPGGGSSGGSISSGLLSGRSD
NHGGSEIVLTQSPATLSLSPGERATLSCRASQSVSSYLAWYQQKPGQAPR
LLIYDASNRATGIPARFSGSGSGTDFTLTISSLEPEDFAVYYCQQSSNWP
RTFGQGTKVEIK]

NV1 NV02 2001 amino acid sequence:

(SEQ ID NO: 1300)

PRVCSTDGGDYCLLPGGGSSGGSISSGLLSGRSDNHGGSEIVLTQSPATL
SLSPGERATLSCRASQSVSSYLAWYQQKPGQAPRLLIYDASNRATGIPAR
FSGSGSGTDFTLTISSLEPEDFAVYYCQQSSNWPRTFGQGTKVEIK

[spacer (SEQ ID NO: 918)] [NV1 NV02 2001 (SEQ ID NO: 1302)] nucleotide sequence:

(SEQ ID NO: 1303)

[CAAGGCCAGTCTGGCCAAGGT][CCTAGGGTTTGCTCTACTGA
TGGTGGTGATTATTGCTTGCTTCCTGGAGGTGGCTCGAGCGGCGGCTCTA
TCTCTTCCGGACTGCTGTCCGGCAGATCCGACAATCACGGCGGATCCGAG
ATCGTGCTGACACAGAGCCCTGCCACCCTGTCTCTGAGCCCTGGCGAAAG
AGCCACCCTGAGCTGTAGAGCCAGCCAGAGCGTGTCCAGCTACCTGGCCT
GGTATCAGCAGAAGCCCGGCCAGGCTCCCCGGCTGCTGATCTACGATGCC
AGCAATAGAGCCACCGGCATCCCCGCCAGATTTTCCGGCTCTGGCAGCGG
CACCGACTTCACCCTGACCATCAGCTCCCTGGAACCCGAGGACTTCGCCG
TGTACTACTGCCAGCAGAGCAGCAACTGGCCCCGGACATTTGGCCAGGGC
ACCAAGGTGGAAATCAAG]

[spacer (SEQ ID NO: 362)] [NV1 NV03 2001 (SEQ ID NO: 1304) amino acid sequence:

(SEQ ID NO: 1305)

[QGQSGQG][PRPQCHHRHNCPDHPGGGSSGGSISSGLLSGRSD
NHGGSEIVLTQSPATLSLSPGERATLSCRASQSVSSYLAWYQQKPGQAPR
LLIYDASNRATGIPARFSGSGSGTDFTLTISSLEPEDFAVYYCQQSSNWP
RTFGQGTKVEIK]

NV1 NV03 2001 amino acid sequence:

(SEQ ID NO: 1304)

PRPQCHHRHNCPDHPGGGSSGGSISSGLLSGRSDNHGGSEIVLTQSPATL
SLSPGERATLSCRASQSVSSYLAWYQQKPGQAPRLLIYDASNRATGIPAR
FSGSGSGTDFTLTISSLEPEDFAVYYCQQSSNWPRTFGQGTKVEIK

[spacer (SEQ ID NO: 918)] [NV1 NV03 2001 (SEQ ID NO: 1306)] nucleotide sequence:

(SEQ ID NO: 1307)

[CAAGGCCAGTCTGGCCAAGGT][CCTCGTCCGCAGTGCCATCA
TCGGCATAATTGTCCTGATCATCCTGGAGGTGGCTCGAGCGGCGGCTCTA
TCTCTTCCGGACTGCTGTCCGGCAGATCCGACAATCACGGCGGATCCGAG
ATCGTGCTGACACAGAGCCCTGCCACCCTGTCTCTGAGCCCTGGCGAAAG
AGCCACCCTGAGCTGTAGAGCCAGCCAGAGCGTGTCCAGCTACCTGGCCT
GGTATCAGCAGAAGCCCGGCCAGGCTCCCCGGCTGCTGATCTACGATGCC
AGCAATAGAGCCACCGGCATCCCCGCCAGATTTTCCGGCTCTGGCAGCGG
CACCGACTTCACCCTGACCATCAGCTCCCTGGAACCCGAGGACTTCGCCG
TGTACTACTGCCAGCAGAGCAGCAACTGGCCCCGGACATTTGGCCAGGGC
ACCAAGGTGGAAATCAAG]

[spacer (SEQ ID NO: 362)] [NV1 NV04 2001 (SEQ ID NO: 1308) amino acid sequence:

(SEQ ID NO: 1309)

[QGQSGQG][KCSRPAHQNPDRCSRGGGSSGGSISSGLLSGRSD
NHGGSEIVLTQSPATLSLSPGERATLSCRASQSVSSYLAWYQQKPGQAPR
LLIYDASNRATGIPARFSGSGSGTDFTLTISSLEPEDFAVYYCQQSSNWP
RTFGQGTKVEIK]

NV1 NV04 2001 amino acid sequence:

(SEQ ID NO: 1308)

KCSRPAHQNPDRCSRGGGSSGGSISSGLLSGRSDNHGGSEIVLTQSPATL
SLSPGERATLSCRASQSVSSYLAWYQQKPGQAPRLLIYDASNRATGIPAR
FSGSGSGTDFTLTISSLEPEDFAVYYCQQSSNWPRTFGQGTKVEIK

[spacer (SEQ ID NO: 918)] [NV1 NV04 2001 (SEQ ID NO: 1310)] nucleotide sequence:

(SEQ ID NO: 1311)

[CAAGGCCAGTCTGGCCAAGGT][AAGTGCTCGCGGCCTGCTCA
TCAGAATCCGGATCGTTGCTCGCGAGGAGGTGGCTCGAGCGGCGGCTCTA
TCTCTTCCGGACTGCTGTCCGGCAGATCCGACAATCACGGCGGATCCGAG
ATCGTGCTGACACAGAGCCCTGCCACCCTGTCTCTGAGCCCTGGCGAAAG
AGCCACCCTGAGCTGTAGAGCCAGCCAGAGCGTGTCCAGCTACCTGGCCT
GGTATCAGCAGAAGCCCGGCCAGGCTCCCCGGCTGCTGATCTACGATGCC
AGCAATAGAGCCACCGGCATCCCCGCCAGATTTTCCGGCTCTGGCAGCGG
CACCGACTTCACCCTGACCATCAGCTCCCTGGAACCCGAGGACTTCGCCG
TGTACTACTGCCAGCAGAGCAGCAACTGGCCCCGGACATTTGGCCAGGGC
ACCAAGGTGGAAATCAAG]

[spacer (SEQ ID NO: 362)] [NV1 NV05 2001 (SEQ ID NO: 1312) amino acid sequence:

(SEQ ID NO: 1313)

[QGQSGQG][ASYRCPDYKCSHTKHGGGSSGGSISSGLLSGRSD
NHGGSEIVLTQSPATLSLSPGERATLSCRASQSVSSYLAWYQQKPGQAPR
LLIYDASNRATGIPARFSGSGSGTDFTLTISSLEPEDFAVYYCQQSSNWP
RTFGQGTKVEIK]

NV1 NV05 2001 amino acid sequence:

(SEQ ID NO: 1312)

ASYRCPDYKCSHTKHGGGSSGGSISSGLLSGRSDNHGGSEIVLTQSPATL
SLSPGERATLSCRASQSVSSYLAWYQQKPGQAPRLLIYDASNRATGIPAR
FSGSGSGTDFTLTISSLEPEDFAVYYCQQSSNWPRTFGQGTKVEIK

[spacer (SEQ ID NO: 918)] [NV1 NV05 2001 (SEQ ID NO: 1314)] nucleotide sequence:

(SEQ ID NO: 1315)

[CAAGGCCAGTCTGGCCAAGGT][GCTTCGTATCGGTGCCCTGA
TTATAAGTGCAGTCATACTAAGCATGGAGGTGGCTCGAGCGGCGGCTCTA
TCTCTTCCGGACTGCTGTCCGGCAGATCCGACAATCACGGCGGATCCGAG
ATCGTGCTGACACAGAGCCCTGCCACCCTGTCTCTGAGCCCTGGCGAAAG
AGCCACCCTGAGCTGTAGAGCCAGCCAGAGCGTGTCCAGCTACCTGGCCT
GGTATCAGCAGAAGCCCGGCCAGGCTCCCCGGCTGCTGATCTACGATGCC
AGCAATAGAGCCACCGGCATCCCCGCCAGATTTTCCGGCTCTGGCAGCGG
CACCGACTTCACCCTGACCATCAGCTCCCTGGAACCCGAGGACTTCGCCG
TGTACTACTGCCAGCAGAGCAGCAACTGGCCCCGGACATTTGGCCAGGGC
ACCAAGGTGGAAATCAAG]

[spacer (SEQ ID NO: 362)] [NV1 NV06 2001 (SEQ ID NO: 1316) amino acid sequence:

(SEQ ID NO: 1317)

[QGQSGQG][LPRCPDHPIKCIETKGGGSSGGSISSGLLSGRSD
NHGGSEIVLTQSPATLSLSPGERATLSCRASQSVSSYLAWYQQKPGQAPR
LLIYDASNRATGIPARFSGSGSGTDFTLTISSLEPEDFAVYYCQQSSNWP
RTFGQGTKVEIK]

NV1 NV06 2001 amino acid sequence:

(SEQ ID NO: 1316)

LPRCPDHPIKCIETKGGGSSGGSISSGLLSGRSDNHGGSEIVLTQSPATL
SLSPGERATLSCRASQSVSSYLAWYQQKPGQAPRLLIYDASNRATGIPAR
FSGSGSGTDFTLTISSLEPEDFAVYYCQQSSNWPRTFGQGTKVEIK

[spacer (SEQ ID NO: 918)] [NV1 NV06 2001 (SEQ ID NO: 1318)] nucleotide sequence:

(SEQ ID NO: 1319)

[CAAGGCCAGTCTGGCCAAGGT][TTGCCGAGGTGCCCGGATCA
TCCGATTAAGTGCATTGAGACTAAGGGAGGTGGCTCGAGCGGCGGCTCTA
TCTCTTCCGGACTGCTGTCCGGCAGATCCGACAATCACGGCGGATCCGAG
ATCGTGCTGACACAGAGCCCTGCCACCCTGTCTCTGAGCCCTGGCGAAAG
AGCCACCCTGAGCTGTAGAGCCAGCCAGAGCGTGTCCAGCTACCTGGCCT
GGTATCAGCAGAAGCCCGGCCAGGCTCCCCGGCTGCTGATCTACGATGCC
AGCAATAGAGCCACCGGCATCCCCGCCAGATTTTCCGGCTCTGGCAGCGG
CACCGACTTCACCCTGACCATCAGCTCCCTGGAACCCGAGGACTTCGCCG
TGTACTACTGCCAGCAGAGCAGCAACTGGCCCCGGACATTTGGCCAGGGC
ACCAAGGTGGAAATCAAG]

[spacer (SEQ ID NO: 362)] [NV1 NV07 2001 (SEQ ID NO: 1320) amino acid sequence:

(SEQ ID NO: 1321)

[QGQSGQG][YTFGCPDRYCDRAATGGGSSGGSISSGLLSGRSDNHGGSE
IVLTQSPATLSLSPGERATLSCRASQSVSSYLAWYQQKPGQAPRLLIYD
ASNRATGIPARFSGSGSGTDFTLTISSLEPEDFAVYYCQQSSNWPRTFGQ
GTKVEIK]

NV1 NV07 2001 amino acid sequence:

(SEQ ID NO: 1320)

YTFGCPDRYCDRAATGGGSSGGSISSGLLSGRSDNHGGSEIVLTQS
PATLSLSPGERATLSCRASQSVSSYLAWYQQKPGQAPRLLIYDASNR
ATGIPARFSGSGSGTDFTLTISSLEPEDFAVYYCQQSSNWPRTFGQG
TKVEIK

[spacer (SEQ ID NO: 918)] [NV1 NV07 2001 (SEQ ID NO: 1322)] nucleotide sequence:

(SEQ ID NO: 1323)

[CAAGGCCAGTCTGGCCAAGGT][TATACGTTTGGTTGCCCTGATAGG
TATTGCGATCGTGCGGCGACGGGAGGTGGCTCGAGCGGCGGCTCTATCT
CTTCCGGACTGCTGTCCGGCAGATCCGACAATCACGGCGGATCCGAGAT
CGTGCTGACACAGAGCCCTGCCACCCTGTCTCTGAGCCCTGGCGAAAGAG
CCACCCTGAGCTGTAGAGCCAGCCAGAGCGTGTCCAGCTACCTGGCCTGG
TATCAGCAGAAGCCCGGCCAGGCTCCCCGGCTGCTGATCTACGATGCCAG
CAATAGAGCCACCGGCATCCCCGCCAGATTTTCCGGCTCTGGCAGCGGCA
CCGACTTCACCCTGACCATCAGCTCCCTGGAACCCGAGGACTTCGCCGTG
TACTACTGCCAGCAGAGCAGCAACTGGCCCCGGACATTTGGCCAGGGCAC
CAAGGTGGAAATCAAG]

[spacer (SEQ ID NO: 362)] [NV1 NV08 2001 (SEQ ID NO: 1324) amino acid sequence:

(SEQ ID NO: 1325)

[QGQSGQG][RGCPDFNPPSHCYTAGGGSSGGSISSGLLSGRSDNHGGSE
IVLTQSPATLSLSPGERATLSCRASQSVSSYLAWYQQKPGQAPRLLIYDA
SNRATGIPARFSGSGSGTDFTLTISSLEPEDFAVYYCQQSSNWPRTFGQG
TKVEIK]

NV1 NV08 2001 amino acid sequence:

(SEQ ID NO: 1324)

RGCPDFNPPSHCYTAGGGSSGGSISSGLLSGRSDNHGGSEIVLTQSPA
TLSLSPGERATLSCRASQSVSSYLAWYQQKPGQAPRLLIYDASNRATGI
PARFSGSGSGTDFTLTISSLEPEDFAVYYCQQSSNWPRTFGQGTKVEIK

[spacer (SEQ ID NO: 918)] [NV1 NV08 2001 (SEQ ID NO: 1326)] nucleotide sequence:

(SEQ ID NO: 1327)

[CAAGGCCAGTCTGGCCAAGGT][CGTGGTTGTCCGGATTTTAATCCTCC
TTCTCATTGCTATACTGCTGGAGGTGGCTCGAGCGGCGGCTCTATCTCTT
CCGGACTGCTGTCCGGCAGATCCGACAATCACGGCGGATCCGAGATCGT
GCTGACACAGAGCCCTGCCACCCTGTCTCTGAGCCCTGGCGAAAGAGCC
ACCCTGAGCTGTAGAGCCAGCCAGAGCGTGTCCAGCTACCTGGCCTGGTA
TCAGCAGAAGCCCGGCCAGGCTCCCCGGCTGCTGATCTACGATGCCAGC
AATAGAGCCACCGGCATCCCCGCCAGATTTTCCGGCTCTGGCAGCGGCAC
CGACTTCACCCTGACCATCAGCTCCCTGGAACCCGAGGACTTCGCCGTGT
ACTACTGCCAGCAGAGCAGCAACTGGCCCCGGACATTTGGCCAGGGCAC
CAAGGTGGAAATCAAG]

[spacer (SEQ ID NO: 362)] [NV1 NV09 2001 (SEQ ID NO: 1328) amino acid sequence:

(SEQ ID NO: 1329)

[QGQSGQG][RDYCGPQSPDYCHEIGGGSSGGSISSGLLSGRSDNHGG
SEIVLTQSPATLSLSPGERATLSCRASQSVSSYLAWYQQKPGQAPRLLIY
DASNRATGIPARFSGSGSGTDFTLTISSLEPEDFAVYYCQQSSNWPRTFG
QGTKVEIK]

NV1 NV09 2001 amino acid sequence:

(SEQ ID NO: 1328)

RDYCGPQSPDYCHEIGGGSSGGSISSGLLSGRSDNHGGSEIVLTQSPA
TLSLSPGERATLSCRASQSVSSYLAWYQQKPGQAPRLLIYDASNRATGI
PARFSGSGSGTDFTLTISSLEPEDFAVYYCQQSSNWPRTFGQGTKVEIK

[spacer (SEQ ID NO: 918)] [NV1 NV09 2001 (SEQ ID NO: 1330)] nucleotide sequence:

(SEQ ID NO: 1331)

[CAAGGCCAGTCTGGCCAAGGT][AGGGATTATTGCGGGCCTCAGAGTCC
TGATTATTGCCATGAGATTGGAGGTGGCTCGAGCGGCGGCTCTATCTCTT
CCGGACTGCTGTCCGGCAGATCCGACAATCACGGCGGATCCGAGATCGT
GCTGACACAGAGCCCTGCCACCCTGTCTCTGAGCCCTGGCGAAAGAGCC
ACCCTGAGCTGTAGAGCCAGCCAGAGCGTGTCCAGCTACCTGGCCTGGTA
TCAGCAGAAGCCCGGCCAGGCTCCCCGGCTGCTGATCTACGATGCCAGCA
ATAGAGCCACCGGCATCCCCGCCAGATTTTCCGGCTCTGGCAGCGGCACC
GACTTCACCCTGACCATCAGCTCCCTGGAACCCGAGGACTTCGCCGTGTA
CTACTGCCAGCAGAGCAGCAACTGGCCCCGGACATTTGGCCAGGGCACCA
AGGTGGAAATCAAG]

[spacer (SEQ ID NO: 362)] [NV1 NV10 2001 (SEQ ID NO: 1332) amino acid sequence:

(SEQ ID NO: 1333)

[QGQSGQG][PNKPCPDLQCYVTNYGGGSSGGSISSGLLSGRSDNHGG
SEIVLTQSPATLSLSPGERATLSCRASQSVSSYLAWYQQKPGQAPRLLIY
DASNRATGIPARFSGSGSGTDFTLTISSLEPEDFAVYYCQQSSNWPRTFG
QGTKVEIK]

NV1 NV10 2001 amino acid sequence:

(SEQ ID NO: 1332)

PNKPCPDLQCYVTNYGGGSSGGSISSGLLSGRSDNHGGSEIVLTQSPA
TLSLSPGERATLSCRASQSVSSYLAWYQQKPGQAPRLLIYDASNRATGI
PARFSGSGSGTDFTLTISSLEPEDFAVYYCQQSSNWPRTFGQGTKVEIK

[spacer (SEQ ID NO: 918)] [NV1 NV10 2001 (SEQ ID NO: 1334)] nucleotide sequence:

(SEQ ID NO: 1335)

[CAAGGCCAGTCTGGCCAAGGT][CCGAATAAGCCTTGCCCGGATCTGC
AGTGCTATGTGACGAATTATGGAGGTGGCTCGAGCGGCGGCTCTATCTCT
TCCGGACTGCTGTCCGGCAGATCCGACAATCACGGCGGATCCGAGATCG
TGCTGACACAGAGCCCTGCCACCCTGTCTCTGAGCCCTGGCGAAAGAGCC
ACCCTGAGCTGTAGAGCCAGCCAGAGCGTGTCCAGCTACCTGGCCTGGTA
TCAGCAGAAGCCCGGCCAGGCTCCCCGGCTGCTGATCTACGATGCCAGC
AATAGAGCCACCGGCATCCCCGCCAGATTTTCCGGCTCTGGCAGCGGCAC
CGACTTCACCCTGACCATCAGCTCCCTGGAACCCGAGGACTTCGCCGTGT
ACTACTGCCAGCAGAGCAGCAACTGGCCCCGGACATTTGGCCAGGGCACC
AAGGTGGAAATCAAG]

[spacer (SEQ ID NO: 362)] [NV1 NV11 2001 (SEQ ID NO: 1336) amino acid sequence:

(SEQ ID NO: 1337)

[QGQSGQG][PRVACGEPDLCYSNTGGGSSGGSISSGLLSGRSDNHGG
SEIVLTQSPATLSLSPGERATLSCRASQSVSSYLAWYQQKPGQAPRLLIY
DASNRATGIPARFSGSGSGTDFTLTISSLEPEDFAVYYCQQSSNWPRTF
GQGTKVEIK]

NV1 NV11 2001 amino acid sequence:

(SEQ ID NO: 1336)

PRVACGEPDLCYSNTGGGSSGGSISSGLLSGRSDNHGGSEIVLTQSPA
TLSLSPGERATLSCRASQSVSSYLAWYQQKPGQAPRLLIYDASNRATGI
PARFSGSGSGTDFTLTISSLEPEDFAVYYCQQSSNWPRTFGQGTKVEIK

[spacer (SEQ ID NO: 918)] [NV1 NV11 2001 (SEQ ID NO: 1338)] nucleotide sequence:

(SEQ ID NO: 1339)

[CAAGGCCAGTCTGGCCAAGGT][CCGCGGGTTGCTTGCGGTGAGCCT
GATCTTTGCTATTCTAATACTGGAGGTGGCTCGAGCGGCGGCTCTATCTC
TTCCGGACTGCTGTCCGGCAGATCCGACAATCACGGCGGATCCGAGATC
GTGCTGACACAGAGCCCTGCCACCCTGTCTCTGAGCCCTGGCGAAAGAGC
CACCCTGAGCTGTAGAGCCAGCCAGAGCGTGTCCAGCTACCTGGCCTGGT
ATCAGCAGAAGCCCGGCCAGGCTCCCCGGCTGCTGATCTACGATGCCAGC
AATAGAGCCACCGGCATCCCCGCCAGATTTTCCGGCTCTGGCAGCGGCAC
CGACTTCACCCTGACCATCAGCTCCCTGGAACCCGAGGACTTCGCCGTGT
ACTACTGCCAGCAGAGCAGCAACTGGCCCCGGACATTTGGCCAGGGCAC
CAAGGTGGAAATCAAG]

[spacer (SEQ ID NO: 362)] [NV1 NV12 2001 (SEQ ID NO: 1340) amino acid sequence:

(SEQ ID NO: 1341)

[QGQSGQG][RGCKKHTISTLTCPDGGGSSGGSISSGLLSGRSDNHGG
SEIVLTQSPATLSLSPGERATLSCRASQSVSSYLAWYQQKPGQAPRLLIY
DASNRATGIPARFSGSGSGTDFTLTISSLEPEDFAVYYCQQSSNWPRTFG
QGTKVEIK]

NV1 NV12 2001 amino acid sequence:

(SEQ ID NO: 1340)

RGCKKHTISTLTCPDGGGSSGGSISSGLLSGRSDNHGGSEIVLTQSPATL
SLSPGERATLSCRASQSVSSYLAWYQQKPGQAPRLLIYDASNRATGIPAR
FSGSGSGTDFTLTISSLEPEDFAVYYCQQSSNWPRTFGQGTKVEIK

[spacer (SEQ ID NO: 918)] [NV1 NV12 2001 (SEQ ID NO: 1342)] nucleotide sequence:

(SEQ ID NO: 1343)

[CAAGGCCAGTCTGGCCAAGGT][CGGGGGTGCAAGAAGCATACTATT
TCGACGCTTACGTGCCCTGATGGAGGTGGCTCGAGCGGCGGCTCTA
TCTCTTCCGGACTGCTGTCCGGCAGATCCGACAATCACGGCGGATCCGAG
ATCGTGCTGACACAGAGCCCTGCCACCCTGTCTCTGAGCCCTGGCGAAAG
AGCCACCCTGAGCTGTAGAGCCAGCCAGAGCGTGTCCAGCTACCTGGCCT
GGTATCAGCAGAAGCCCGGCCAGGCTCCCCGGCTGCTGATCTACGATGCC
AGCAATAGAGCCACCGGCATCCCCGCCAGATTTTCCGGCTCTGGCAGCGG
CACCGACTTCACCCTGACCATCAGCTCCCTGGAACCCGAGGACTTCGCCG
TGTACTACTGCCAGCAGAGCAGCAACTGGCCCCGGACATTTGGCCAGGGC
ACCAAGGTGGAAATCAAG]

human kappa constant

(SEQ ID NO: 1344)

RTVAAPSVFIFPPSDEQLKSGTASVVCLLNNFYPREAKVQWKVDNALQSG
NSQESVTEQDSKDSTYSLSSTLTLSKADYEKHKVYACEVTHQGLSSPVTK
SFNRGEC

human kappa constant

(SEQ ID NO: 1345)

CGTACGGTGGCTGCACCATCTGTCTTCATCTTCCCGCCATCTGATGAGCA
GTTGAAATCTGGAACTGCCTCTGTTGTGTGCCTGCTGAATAACTTCTATC
CCAGAGAGGCCAAAGTACAGTGGAAGGTGGATAACGCCCTCCAATCGGGT
AACTCCCAGGAGAGTGTCACAGAGCAGGACAGCAAGGACAGCACCTACAG
CCTCAGCAGCACCCTGACGCTGAGCAAAGCAGACTACGAGAAACACAAAG
TCTACGCCTGCGAAGTCACCCATCAGGGCCTGAGCTCGCCCGTCACAAAG
AGCTTCAACAGGGGAGAGTGT

NV1 HC variable

(SEQ ID NO: 1346)

[sequence omitted]

NV1 HC variable

(SEQ ID NO: 1347)

CAGGTGCAGCTGGTGGAATCTGGCGGCGGAGTGGTGCAGCCTGGCAGAAG
CCTGAGACTGGACTGCAAGGCCAGCGGCATCACCTTCAGCAACAGCGGCA
TGCACTGGGTGCGCCAGGCCCCTGGAAAAGGCCTGGAATGGGTGGCCGTG
ATTTGGTACGACGGCAGCAAGCGGTACTACGCCGACAGCGTGAAGGGCCG
GTTCACCATCAGCCGGGACAACAGCAAGAATACCCTGTTCCTGCAGATGA
ACAGCCTGCGGGCCGAGGACACCGCCGTGTACTACTGCGCCACCAACGAC
GACTATTGGGGCCAGGGCACACTCGTGACCGTGTCCTCT

hIgG4 S228P constant

(SEQ ID NO: 1348)

ASTKGPSVFPLAPCSRSTSESTAALGCLVKDYFPEPVTVSWNSGALTSGV
HTFPAVLQSSGLYSLSSVVTVPSSSLGTKTYTCNVDHKPSNTKVDKRVES
KYGPPCPPCPAPEFLGGPSVFLFPPKPKDTLMISRTPEVTCVVVDVSQED
PEVQFNWYVDGVEVHNAKTKPREEQFNSTYRVVSVLTVLHQDWLNGKEYK
CKVSNKGLPSSIEKTISKAKGQPREPQVYTLPPSQEEMTKNQVSLTCLVK
GFYPSDIAVEWESNGQPENNYKTTPPVLDSDGSFFLYSRLTVDKSRWQEG
NVFSCSVMHEALHNHYTQKSLSLSLGK

hIgG4 S228P constant

(SEQ ID NO: 1349)

GCTAGCACCAAGGGCCCATCGGTCTTCCCCCTGGCACCCTGTAGCAGAAG
CACCAGCGAGTCTACAGCGGCCCTGGGCTGCCTGGTCAAGGACTACTTCC
CCGAACCGGTGACGGTGTCGTGGAACTCAGGCGCCCTGACCAGCGGCGTG
CACACCTTCCCGGCTGTCCTACAGTCCTCAGGACTCTACTCCCTCAGCAG
CGTGGTGACCGTGCCCTCCAGCAGCTTGGGCACCAAGACCTACACCTGTA
ACGTGGACCACAAGCCCAGCAACACCAAGGTGGACAAGCGGGTGGAATCT
AAGTACGGCCCTCCCTGCCCTCCTTGCCCAGCCCCTGAATTTCTGGGGGG
ACCGTCAGTCTTCCTCTTCCCCCCAAAACCCAAGGACACCCTCATGATCT
CCCGGACCCCTGAGGTCACATGCGTGGTGGTGGACGTGAGCCAGGAAGAC
CCTGAGGTCCAGTTCAACTGGTACGTGGACGGCGTGGAGGTGCATAATGC
CAAGACAAAGCCGCGGGAGGAGCAGTTCAACAGCACGTACCGTGTGGTCA
GCGTCCTCACCGTCCTGCACCAGGACTGGCTGAATGGCAAGGAGTACAAG
TGCAAGGTCTCCAACAAAGGCCTGCCCAGCTCCATCGAGAAAACCATCTC
CAAAGCCAAAGGGCAGCCCCGAGAACCACAGGTGTACACCCTGCCCCCAT
CCCAGGAGGAGATGACCAAGAACCAGGTCAGCCTGACCTGCCTGGTCAAA
GGCTTCTATCCCAGCGACATCGCCGTGGAGTGGGAGAGCAATGGGCAGCC
GGAGAACAACTACAAGACCACGCCTCCCGTGCTGGACTCCGACGGCTCCT
TCTTCCTCTACAGCAGACTCACCGTGGACAAGAGCAGGTGGCAGGAAGGG
AACGTCTTCTCATGCTCCGTGATGCATGAGGCTCTGCACAACCACTACAC
GCAGAAGAGCCTCTCCCTGTCTCTGGGTAAA

### Example 21

### Characterization of Activatable Anti-PD1 NV1 Antibodies

[0897] This example describes activatable anti-PD1 NV1 antibodies with reduced binding to hPD1.

[0898] Masking efficiencies were evaluated by standard plate ELISA. Briefly, human PD1-Fc (Rand D systems, Minneapolis, Minn.) was adsorbed to the wells of a 96-well ELISA plate. Purified NV1 and activatable NV1 antibodies were applied to the plate in serial dilution and allowed to bind. Bound antibody and activatable antibodies were detected with anti-hu Fab-HRP conjugate (Sigma, St Louis, Mo.) and visualized with the chromogenic substrate TMB (Thermo Scientific, Rockford, Ill.). Plots were generated in Prizm (Sigma Plot). All activatable NV1 antibodies showed decreased binding compared with the parental NV1, as shown in FIG. 26.

### Example 22

### Activatable Anti-PD1 Pembrolizumab Masking Moieties

[0899] This example describes identification of masking moieties (MM) that reduce binding of anti-PD1 pembrolizumab antibody to its target.

[0900] Anti-PD1 Pembrolizumab (PM1) (see, e.g., U.S. Pat. No. 8,354,509) was used to screen libraries using a method similar to that described in PCT International Publication Number WO 2010/081173, published 15 Jul. 2010. The screening consisted of one round of MACS and three rounds of FACS sorting. For the initial MACS, approximately 1.6×10¹² cells were incubated with PM1 antibody at a concentration of 200 nM, and approximately 8×10⁶ binders were collected using Protein-A Dynabeads (Life Technologies, Carlsbad, Calif.). FACS rounds were conducted labeling cells with DyLight 650 (Thermo-Fisher) labeled PM1 antibody and collecting cells with strongest fluorescence as follows: 100 nM PM1-650 collecting brightest 10% for FACS round 1 (5.6×10⁵ for F1), 10 nM PM1-650 collecting brightest 1.5% for FACS round 2 (1.4×10⁴ for F2), 1 nM PM1-650 collecting all binders above background (4,000) and the top 0.2% (820) for FACS round 3 (F3). Individual peptide clones from the two F3 populations were identified by sequence analysis (Table 20), and selected peptide clones PM01-PM12 were subsequently verified for their ability to bind PM1 (masking moiety PM001 is also referred to herein as PM01 and/or PM-01; masking moiety PM002 is also referred to herein as PM02 and/or PM-02, and so on).

TABLE 20

| Mask | Amino Acid Sequence | SEQ ID NO: |
|---|---|---|
| PM01 | GCDFTSAKHNCGSGW | 1351 |
| PM02 | VGSNCWTGPACALTS | 1352 |
| PM03 | FCAVMFDFLSDRCLH | 1353 |
| PM04 | FCPPWLDYLGNKCMT | 1354 |
| PM05 | MSCWDFSSAQGCGQH | 1355 |
| PM06 | LMCADLHYNHYNCKY | 1356 |
| PM07 | ELCGWQSFSGVCTSE | 1357 |
| PM08 | WTYENCWASCQPHLE | 1358 |
| PM09 | KLTEDFSSAA | 1359 |
| PM10 | VGQSCFSGLVCDRQL | 1360 |
| PM11 | ISHYCFSGKSCRD | 1361 |
| PM12 | HCIPDFTSAAGDCMR | 1362 |
| PM13 | RLVSAYSFS | 1363 |
| PM14 | KFHHSHPLVHDFTSA | 1364 |
| PM15 | ASYPDFSSANGVGLR | 1365 |
| PM16 | GLATTLSNVDFTSAG | 1366 |
| PM17 | DFTSANSAFSGDAST | 1367 |
| PM18 | GRLPGHSVVDFTSAW | 1368 |
| PM19 | SGSFYSSSAFDFTSA | 1369 |
| PM20 | CDDFTSAQHSRINEC | 1370 |
| PM21 | CDFTSAQGKKCRTAL | 1371 |
| PM22 | YYIDKYQSPSYGPVL | 1372 |
| PM23 | FSVARARSSADFTSS | 1373 |
| PM24 | DSDFTSAGSADSRSR | 1374 |
| PM25 | CDFTSATSISKRCDH | 1375 |
| PM26 | IESSASSWGLQASRN | 1376 |
| PM27 | PRYHNLNFTTPALSPGS | 1377 |
| PM28 | DLFARFPLDRDFTSA | 1378 |
| PM29 | HCNFTTPPYCSSTLW | 1379 |
| PM30 | NVPIILLTDRQLLSG | 1380 |
| PM31 | NPTACDFTSSMATYC | 1381 |
| PM32 | FVRTVRFSNSMFSVP | 1382 |
| PM33 | YDFSSASNSSPSRQT | 1383 |
| PM34 | AHPDFSSAMRGNLLG | 1384 |
| PM35 | SSHVVHKDFTSANSR | 1385 |
| PM36 | CPDFTSANGGGCWQM | 1386 |
| PM37 | SLGQSYPTDFTCPGC | 1387 |
| PM38 | ASMRSHEQRDFTSAY | 1388 |
| PM39 | SCQFWFTLCSGGVFH | 1389 |
| PM40 | PYPNNRTGMHDFTSA | 1390 |
| PM41 | KPFPIDFTSAGTSGT | 1391 |
| PM42 | SIKSFIPRDDFTSAA | 1392 |
| PM43 | GIKNPATPFVDFTSA | 1393 |
| PM44 | LSHTYPRGSSTIEAS | 1394 |
| PM45 | PSLDFSSAT | 1395 |
| PM46 | AFTPRIAPTFDVMKE | 1396 |
| PM47 | LCGLQIPPDCERS | 1397 |
| PM48 | AAKMVSHSERDFTSA | 1398 |
| PM49 | VSVECFSGMQCPHYY | 1399 |
| PM50 | ASKCRLPCMASTQIY | 1400 |
| PM51 | GLRSCNIYFSIPCTY | 1401 |
| PM52 | RGTSDGTLDFTTARS | 1402 |
| PM53 | SMYPSASRLLHPQYP | 1403 |
| PM54 | HCISCYDFTSAAGSF | 1404 |
| PM55 | SSGRWGDAWACARIC | 1405 |
| PM56 | RVFSDFTSASHSFGG | 1406 |
| PM57 | TDRHSASGRDFTSAH | 1407 |
| PM58 | AHCEDFSSAERIATMGC | 1408 |
| PM59 | ACDPYSFSIPCDDRL | 1409 |
| PM60 | NSPFTLSHIYDR | 1410 |
| PM61 | IGTNFTTPSAFVAFP | 1411 |
| PM62 | RDAFPIYRNADFSTP | 1412 |
| PM63 | SIPNASSYNFTSSSG | 1413 |
| PM64 | AGIPDKRHTYDFTSA | 1414 |
| PM65 | WPLAHDSRDWNFTTP | 1415 |
| PM66 | RHSPSSGHVDFTSAG | 1416 |
| PM67 | SCFAWTDPVWNRCSW | 1417 |
| PM68 | MPCDWTGPGKIWCGG | 1418 |
| PM69 | RDCDFSTANFRSCNK | 1419 |
| PM70 | LSCVVSPNYLHCNDH | 1420 |
| PM71 | FVCGLYSFSGVCQGV | 1421 |
| PM72 | IGLMCFSGLQCPMLA | 1422 |
| PM73 | PGMNCFSGEICQMST | 1423 |
| PM74 | GDVGSCWASCGLQGG | 1424 |
| PM75 | SQFQDCWASCGASFT | 1425 |
| PM76 | VGSLNCWYSCGDIWL | 1426 |
| PM77 | MCESWLNFLGDQCGM | 1427 |
| PM78 | RCMISQSSFSGMCGM | 1428 |
| PM79 | NCAPWTSNMSNHCLK | 1429 |
| PM80 | LCGVGSATGLELCGV | 1430 |
| PM81 | GCDFSSLGGRQPCTP | 1431 |
| PM82 | MGCNFTTYPYHTCNT | 1432 |
| PM83 | GSCDFTSGAGKKCGS | 1433 |
| PM84 | VSCDFTSSHARMCSR | 1434 |
| PM85 | MRCTDFYYNHTNCIG | 1435 |
| PM86 | RSCDFTSAANKYCAT | 1436 |
| PM87 | LYCDSFSVPRPNCAP | 1437 |
| PM88 | NSCDFTSARVSKCST | 1438 |
| PM89 | STCSDNFTTPMPCNT | 1439 |
| PM90 | DICNDRPNLTHCHYF | 1440 |
| PM91 | LRCDDFTSAIGCRGY | 1441 |
| PM92 | EGCDFTSALHSCNNY | 1442 |
| PM93 | RKGCGDFTSASCFVV | 1443 |
| PM94 | GMLCAGSSFGLCESM | 1444 |
| PM95 | RESCFGSSLGLCTNK | 1445 |
| PM96 | ILRCYDIPTNCMNFN | 1446 |
| PM97 | NSECTFGAMYCRNKP | 1447 |
| PM98 | ASGCFDEDIRCSGGA | 1448 |
| PM99 | HYFCNQSNPSCQTAP | 1449 |
| PM100 | AMGCELGGAGCIGSP | 1450 |
| PM101 | TLKCHMPRKLCANDP | 1451 |
| PM102 | RPACRDLPHNCITST | 1452 |
| PM103 | QMSCHGNFTTCHSNP | 1453 |
| PM104 | LTGCARGARPCRLRV | 1454 |
| PM105 | WSELCLAGPSCGWVG | 1455 |
| PM106 | VTKSCWQLPHCITAP | 1456 |
| PM107 | KAASCPHNQICNMTA | 1457 |
| PM108 | VSKNCFSGMMCPVFA | 1458 |
| PM109 | NRSSCWTGPTCHVLH | 1459 |
| PM110 | ARTGCSGPVCLNDVS | 1460 |
| PM111 | STRTCLAFTCINGNT | 1461 |
| PM112 | MLDGNCWYACSYKNT | 1462 |
| PM113 | FSRSDCWSACAPWRV | 1463 |
| PM114 | GGRMDCWASCQPLSR | 1464 |
| PM115 | NSPHSCMTNCDFTSA | 1465 |

### Example 23

### Activatable Anti-PD1 Pembrolizumab Antibodies

[0901] This example describes examples of activatable anti-PD1 Pembrolizumab antibodies of the disclosure.

[0902] Activatable anti-PD1 PM1 antibodies comprising an anti-PD1 PM1 masking moiety, a cleavable moiety, and an anti-PD1 PM1 antibody of the disclosure were produced according to methods similar to those described in PCT Publication Nos. WO 2009/025846 and WO 2010/081173. One embodiment of the disclosure is an anti-PD-1 activatable antibody comprising a heavy chain comprising amino acid sequence SEQ ID NO: 1514. One embodiment of the disclosure is an anti-PD-1 activatable antibody comprising a light chain comprising amino acid sequence SEQ ID NO: 638. One embodiment of the disclosure is an anti-PD-1 activatable antibody comprising a heavy chain comprising amino acid sequence SEQ ID NO: 1514 and a light chain comprising amino acid sequence SEQ ID NO: 638. One embodiment of the disclosure is an anti-PD-1 activatable antibody comprising the CDRs of an anti-PD-1 activatable antibody comprising a heavy chain comprising amino acid sequence SEQ ID NO: 1514 and a light chain comprising amino acid sequence SEQ ID NO: 638.

[0903] The amino acid and nucleic acid sequences of several activatable anti-PD1 antibody variable domains of the disclosure are provided below. Antibodies were produced as hIgG4 containing a single amino acid substitution, 5228P (Angal, et al. 1993. Mol Immunol 30:105-8.) HC and hK LC format.

PM1 light chain amino acid sequence:

(SEQ ID NO: 638)

[sequence omitted]

[spacer (SEQ ID NO: 362)] [PM1 PM01 2001 (SEQ ID NO: 1466)] amino acid sequence:

(SEQ ID NO: 1467)

[QGQSGQG][CDFTSAKHNCGSGWGSSGGSISSGLLSGRSDNHGGSEI
VLTQSPATLSLSPGERATLSCRASKGVSTSGYSYLHWYQQKPGQAPRLLI
YLASYLESGVPARFSGSGSGTDFTLTISSLEPEDFAVYYCQHSRDLPLTF
GGGTKVEIK]

PM1 PM01 2001 amino acid sequence:

(SEQ ID NO: 1466)

CDFTSAKHNCGSGWGSSGGSISSGLLSGRSDNHGGSEIVLTQSPATLSLS
PGERATLSCRASKGVSTSGYSYLHWYQQKPGQAPRLLIYLASYLESGVPA
RFSGSGSGTDFTLTISSLEPEDFAVYYCQHSRDLPLTFGGGTKVEIK

[spacer (SEQ ID NO: 1126)] [PM1 PM01 2001 (SEQ ID NO: 1468)] nucleotide sequence:

(SEQ ID NO: 1469)

[CAAGGCCAGTCTGGCCAAGGA][TGCGATTTTACTTCTGCCAAGCAC
AATTGCGGCTCTGGCTGGGGCTCGAGCGGCGGCTCTATCTCTTCCGGACT
GCTGTCCGGCAGATCCGACAATCACGGCGGATCCGAGATCGTGCTGACAC
AGAGCCCTGCCACCCTGTCTCTGAGCCCTGGCGAAAGAGCCACCCTGAGC
TGTAGAGCCTCTAAGGGCGTGTCCACCAGCGGCTACAGCTACCTGCACTG
GTATCAGCAGAAGCCCGGCCAGGCCCCCAGACTGCTGATCTACCTGGCCT
CCTACCTGGAAAGCGGCGTGCCCGCCAGATTTTCTGGCTCTGGCAGCGGC
ACCGACTTCACCCTGACAATCAGCAGCCTGGAACCCGAGGACTTCGCCGT
GTACTACTGCCAGCACAGCAGGGACCTGCCCCTGACATTTGGCGGAGGCA
CCAAGGTGGAAATCAAG]

[spacer (SEQ ID NO: 362)] [PM1 PM02 2001 (SEQ ID NO: 1470)] amino acid sequence:

(SEQ ID NO: 1471)

[QGQSGQG][VGSNCWTGPACALTSGGGSSGGSISSGLLSGRSDNHGG
SEIVLTQSPATLSLSPGERATLSCRASKGVSTSGYSYLHWYQQKPGQAPR
LLIYLASYLESGVPARFSGSGSGTDFTLTISSLEPEDFAVYYCQHSRDLP
LTFGGGTKVEIK]

PM1 PM02 2001 amino acid sequence:

(SEQ ID NO: 1470)

VGSNCWTGPACALTSGGGSSGGSISSGLLSGRSDNHGGSEIVLTQSPATL
SLSPGERATLSCRASKGVSTSGYSYLHWYQQKPGQAPRLLIYLASYLESG
VPARFSGSGSGTDFTLTISSLEPEDFAVYYCQHSRDLPLTFGGGTKVEIK

[spacer (SEQ ID NO: 918)] [PM1 PM02 2001 (SEQ ID NO: 1472)] nucleotide sequence:

(SEQ ID NO: 1473)

[CAAGGCCAGTCTGGCCAAGGT][GTTGGGTCGAATTGCTGGACGGGGCC
GGCGTGCGCTTTGACGTCGGGAGGTGGCTCGAGCGGCGGCTCTATCTCTT
CCGGACTGCTGTCCGGCAGATCCGACAATCACGGCGGATCCGAGATCGTG
CTGACACAGAGCCCTGCCACCCTGTCTCTGAGCCCTGGCGAAAGAGCCAC
CCTGAGCTGTAGAGCCTCTAAGGGCGTGTCCACCAGCGGCTACAGCTACC
TGCACTGGTATCAGCAGAAGCCCGGCCAGGCCCCCAGACTGCTGATCTAC
CTGGCCTCCTACCTGGAAAGCGGCGTGCCCGCCAGATTTTCTGGCTCTGG
CAGCGGCACCGACTTCACCCTGACAATCAGCAGCCTGGAACCCGAGGACT
TCGCCGTGTACTACTGCCAGCACAGCAGGGACCTGCCCCTGACATTTGGC
GGAGGCACCAAGGTGGAAATCAAG]

[spacer (SEQ ID NO: 362)] [PM1 PM03 2001 (SEQ ID NO: 1474)] amino acid sequence:

(SEQ ID NO: 1475)

[QGQSGQG][FCAVMFDFLSDRCLHGGGSSGGSISSGLLSGRSDNHGGSE
IVLTQSPATLSLSPGERATLSCRASKGVSTSGYSYLHWYQQKPGQAPRLL
IYLASYLESGVPARFSGSGSGTDFTLTISSLEPEDFAVYYCQHSRDLPLT
FGGGTKVEIK]

PM1 PM03 2001 amino acid sequence:

(SEQ ID NO: 1474)

FCAVMFDFLSDRCLHGGGSSGGSISSGLLSGRSDNHGGSEIVLTQSPATL
SLSPGERATLSCRASKGVSTSGYSYLHWYQQKPGQAPRLLIYLASYLESG
VPARFSGSGSGTDFTLTISSLEPEDFAVYYCQHSRDLPLTFGGGTKVEIK

[spacer (SEQ ID NO: 918)] [PM1 PM03 2001 (SEQ ID NO: 1476)] nucleotide sequence:

(SEQ ID NO: 1477)

[CAAGGCCAGTCTGGCCAAGGT][TTTTGCGCTGTGATGTTTGATTTTCT
GTCTGATCGGTGCCTGCATGGAGGTGGCTCGAGCGGCGGCTCTATCTCTT
CCGGACTGCTGTCCGGCAGATCCGACAATCACGGCGGATCCGAGATCGTG
CTGACACAGAGCCCTGCCACCCTGTCTCTGAGCCCTGGCGAAAGAGCCAC
CCTGAGCTGTAGAGCCTCTAAGGGCGTGTCCACCAGCGGCTACAGCTACC
TGCACTGGTATCAGCAGAAGCCCGGCCAGGCCCCCAGACTGCTGATCTAC
CTGGCCTCCTACCTGGAAAGCGGCGTGCCCGCCAGATTTTCTGGCTCTGG
CAGCGGCACCGACTTCACCCTGACAATCAGCAGCCTGGAACCCGAGGACT
TCGCCGTGTACTACTGCCAGCACAGCAGGGACCTGCCCCTGACATTTGGC
GGAGGCACCAAGGTGGAAATCAAG]

[spacer (SEQ ID NO: 362)] [PM1 PM04 2001 (SEQ ID NO: 1478)] amino acid sequence:

(SEQ ID NO: 1479)

[QGQSGQG][FCPPWLDYLGNKCMTGGGSSGGSISSGLLSGRSDNHGGSE
IVLTQSPATLSLSPGERATLSCRASKGVSTSGYSYLHWYQQKPGQAPRLL
IYLASYLESGVPARFSGSGSGTDFTLTISSLEPEDFAVYYCQHSRDLPLT
FGGGTKVEIK]

PM1 PM04 2001 amino acid sequence:

(SEQ ID NO: 1478)

FCPPWLDYLGNKCMTGGGSSGGSISSGLLSGRSDNHGGSEIVLTQSPATL
SLSPGERATLSCRASKGVSTSGYSYLHWYQQKPGQAPRLLIYLASYLESG
VPARFSGSGSGTDFTLTISSLEPEDFAVYYCQHSRDLPLTFGGGTKVEIK

[spacer (SEQ ID NO: 918)] [PM1 PM04 2001 (SEQ ID NO: 1480)] nucleotide sequence:

(SEQ ID NO: 1481)

[CAAGGCCAGTCTGGCCAAGGT][TTTTGCCCGCCGTGGTTGGATTATTT
GGGTAATAAGTGCATGACGGGAGGTGGCTCGAGCGGCGGCTCTATCTCTT
CCGGACTGCTGTCCGGCAGATCCGACAATCACGGCGGATCCGAGATCGTG
CTGACACAGAGCCCTGCCACCCTGTCTCTGAGCCCTGGCGAAAGAGCCAC
CCTGAGCTGTAGAGCCTCTAAGGGCGTGTCCACCAGCGGCTACAGCTACC
TGCACTGGTATCAGCAGAAGCCCGGCCAGGCCCCCAGACTGCTGATCTAC
CTGGCCTCCTACCTGGAAAGCGGCGTGCCCGCCAGATTTTCTGGCTCTGG
CAGCGGCACCGACTTCACCCTGACAATCAGCAGCCTGGAACCCGAGGACT
TCGCCGTGTACTACTGCCAGCACAGCAGGGACCTGCCCCTGACATTTGGC
GGAGGCACCAAGGTGGAAATCAAG]

[spacer (SEQ ID NO: 362)] [PM1 PM05 2001 (SEQ ID NO: 1482)] amino acid sequence:

(SEQ ID NO: 1483)

[QGQSGQG][MSCWDFSSAQGCGQHGGGSSGGSISSGLLSGRSDNHGGSE
IVLTQSPATLSLSPGERATLSCRASKGVSTSGYSYLHWYQQKPGQAPRLL
IYLASYLESGVPARFSGSGSGTDFTLTISSLEPEDFAVYYCQHSRDLPLT
FGGGTKVEIK]

PM1 PM05 2001 amino acid sequence:

(SEQ ID NO: 1482)

MSCWDFSSAQGCGQHGGGSSGGSISSGLLSGRSDNHGGSEIVLTQSPATL
SLSPGERATLSCRASKGVSTSGYSYLHWYQQKPGQAPRLLIYLASYLESG
VPARFSGSGSGTDFTLTISSLEPEDFAVYYCQHSRDLPLTFGGGTKVEIK

[spacer (SEQ ID NO: 918)] [PM1 PM05 2001 (SEQ ID NO: 1484)] nucleotide sequence:

(SEQ ID NO: 1485)

[CAAGGCCAGTCTGGCCAAGGT][ATGTCTTGCTGGGATTTTTCTTCGGC
TCAGGGGTGCGGTCAGCATGGAGGTGGCTCGAGCGGCGGCTCTATCTCTT
CCGGACTGCTGTCCGGCAGATCCGACAATCACGGCGGATCCGAGATCGTG
CTGACACAGAGCCCTGCCACCCTGTCTCTGAGCCCTGGCGAAAGAGCCAC
CCTGAGCTGTAGAGCCTCTAAGGGCGTGTCCACCAGCGGCTACAGCTACC
TGCACTGGTATCAGCAGAAGCCCGGCCAGGCCCCCAGACTGCTGATCTAC
CTGGCCTCCTACCTGGAAAGCGGCGTGCCCGCCAGATTTTCTGGCTCTGG
CAGCGGCACCGACTTCACCCTGACAATCAGCAGCCTGGAACCCGAGGACT
TCGCCGTGTACTACTGCCAGCACAGCAGGGACCTGCCCCTGACATTTGGC
GGAGGCACCAAGGTGGAAATCAAG]

[spacer (SEQ ID NO: 362)] [PM1 PM06 2001 (SEQ ID NO: 1486)] amino acid sequence:

(SEQ ID NO: 1487)

[QGQSGQG][LMCADLHYNHYNCKYGGGSSGGSISSGLLSGRSDNHGGSE
IVLTQSPATLSLSPGERATLSCRASKGVSTSGYSYLHWYQQKPGQAPRLL
IYLASYLESGVPARFSGSGSGTDFTLTISSLEPEDFAVYYCQHSRDLPLT
FGGGTKVEIK]

PM1 PM06 2001 amino acid sequence:

(SEQ ID NO: 1486)

LMCADLHYNHYNCKYGGGSSGGSISSGLLSGRSDNHGGSEIVLTQSPATL
SLSPGERATLSCRASKGVSTSGYSYLHWYQQKPGQAPRLLIYLASYLESG
VPARFSGSGSGTDFTLTISSLEPEDFAVYYCQHSRDLPLTFGGGTKVEIK

[spacer (SEQ ID NO: 918)] [PM1 PM06 2001 (SEQ ID NO: 1488)] nucleotide sequence:

(SEQ ID NO: 1489)

[CAAGGCCAGTCTGGCCAAGGT][TTGATGTGCGCTGATTTGCATTATAA
TCATTATAATTGCAAGTATGGAGGTGGCTCGAGCGGCGGCTCTATCTCTT
CCGGACTGCTGTCCGGCAGATCCGACAATCACGGCGGATCCGAGATCGTG
CTGACACAGAGCCCTGCCACCCTGTCTCTGAGCCCTGGCGAAAGAGCCAC
CCTGAGCTGTAGAGCCTCTAAGGGCGTGTCCACCAGCGGCTACAGCTACC
TGCACTGGTATCAGCAGAAGCCCGGCCAGGCCCCCAGACTGCTGATCTAC
CTGGCCTCCTACCTGGAAAGCGGCGTGCCCGCCAGATTTTCTGGCTCTGG
CAGCGGCACCGACTTCACCCTGACAATCAGCAGCCTGGAACCCGAGGACT
TCGCCGTGTACTACTGCCAGCACAGCAGGGACCTGCCCCTGACATTTGGC
GGAGGCACCAAGGTGGAAATCAAG]

[spacer (SEQ ID NO: 362)] [PM1 PM07 2001 (SEQ ID NO: 1490)] amino acid sequence:

(SEQ ID NO: 1491)

[QGQSGQG][ELCGWQSFSGVCTSEGGGSSGGSISSGLLSGRSDNHGGSE
IVLTQSPATLSLSPGERATLSCRASKGVSTSGYSYLHWYQQKPGQAPRLL
IYLASYLESGVPARFSGSGSGTDFTLTISSLEPEDFAVYYCQHSRDLPLT
FGGGTKVEIK]

PM1 PM07 2001 amino acid sequence:

(SEQ ID NO: 1490)

ELCGWQSFSGVCTSEGGGSSGGSISSGLLSGRSDNHGGSEIVLTQSPATL
SLSPGERATLSCRASKGVSTSGYSYLHWYQQKPGQAPRLLIYLASYLESG
VPARFSGSGSGTDFTLTISSLEPEDFAVYYCQHSRDLPLTFGGGTKVEIK

[spacer (SEQ ID NO: 918)] [PM1 PM07 2001 (SEQ ID NO: 1492)] nucleotide sequence:

(SEQ ID NO: 1493)

[CAAGGCCAGTCTGGCCAAGGT][GAGTTGTGCGGTTGGCAGAGTTTTTC
GGGGGTTTGCACTAGTGAGGGAGGTGGCTCGAGCGGCGGCTCTATCTCTT
CCGGACTGCTGTCCGGCAGATCCGACAATCACGGCGGATCCGAGATCGTG
CTGACACAGAGCCCTGCCACCCTGTCTCTGAGCCCTGGCGAAAGAGCCAC
CCTGAGCTGTAGAGCCTCTAAGGGCGTGTCCACCAGCGGCTACAGCTACC
TGCACTGGTATCAGCAGAAGCCCGGCCAGGCCCCCAGACTGCTGATCTAC
CTGGCCTCCTACCTGGAAAGCGGCGTGCCCGCCAGATTTTCTGGCTCTGG
CAGCGGCACCGACTTCACCCTGACAATCAGCAGCCTGGAACCCGAGGACT
TCGCCGTGTACTACTGCCAGCACAGCAGGGACCTGCCCCTGACATTTGGC
GGAGGCACCAAGGTGGAAATCAAG]

[spacer (SEQ ID NO: 362)] [PM1 PM08 2001 (SEQ ID NO: 1494)] amino acid sequence:

(SEQ ID NO: 1495)

[QGQSGQG][WTYENCWASCQPHLEGGGSSGGSISSGLLSGRSDNHGGSE
IVLTQSPATLSLSPGERATLSCRASKGVSTSGYSYLHWYQQKPGQAPRLL
IYLASYLESGVPARFSGSGSGTDFTLTISSLEPEDFAVYYCQHSRDLPLT
FGGGTKVEIK]

PM1 PM08 2001 amino acid sequence:

(SEQ ID NO: 1494)

WTYENCWASCQPHLEGGGSSGGSISSGLLSGRSDNHGGSEIVLTQSPATL
SLSPGERATLSCRASKGVSTSGYSYLHWYQQKPGQAPRLLIYLASYLESG
VPARFSGSGSGTDFTLTISSLEPEDFAVYYCQHSRDLPLTFGGGTKVEIK

[spacer (SEQ ID NO: 918)] [PM1 PM08 2001 (SEQ ID NO: 1496)] nucleotide sequence:

(SEQ ID NO: 1497)

[CAAGGCCAGTCTGGCCAAGGT][TGGACTTATGAGAATTGCTGGGCTTC
GTGCCAGCCTCATTTGGAGGGAGGTGGCTCGAGCGGCGGCTCTATCTCTT
CCGGACTGCTGTCCGGCAGATCCGACAATCACGGCGGATCCGAGATCGTG
CTGACACAGAGCCCTGCCACCCTGTCTCTGAGCCCTGGCGAAAGAGCCAC
CCTGAGCTGTAGAGCCTCTAAGGGCGTGTCCACCAGCGGCTACAGCTACC
TGCACTGGTATCAGCAGAAGCCCGGCCAGGCCCCCAGACTGCTGATCTAC
CTGGCCTCCTACCTGGAAAGCGGCGTGCCCGCCAGATTTTCTGGCTCTGG
CAGCGGCACCGACTTCACCCTGACAATCAGCAGCCTGGAACCCGAGGACT
TCGCCGTGTACTACTGCCAGCACAGCAGGGACCTGCCCCTGACATTTGGC
GGAGGCACCAAGGTGGAAATCAAG]

[spacer (SEQ ID NO: 913)] [PM1 PM09 2001 (SEQ ID NO: 1498)] amino acid sequence:

(SEQ ID NO: 1499)

[QGQSGQ][KLTEDFSSAAGSSGGSISSGLLSGRSDNHGGSEIVLTQSPA
TLSLSPGERATLSCRASKGVSTSGYSYLHWYQQKPGQAPRLLIYLASYLE
SGVPARFSGSGSGTDFTLTISSLEPEDFAVYYCQHSRDLPLTFGGGTKVE
IK]

PM1 PM09 2001 amino acid sequence:

(SEQ ID NO: 1498)

KLTEDFSSAAGSSGGSISSGLLSGRSDNHGGSEIVLTQSPATLSLSPGER
ATLSCRASKGVSTSGYSYLHWYQQKPGQAPRLLIYLASYLESGVPARFSG
SGSGTDFTLTISSLEPEDFAVYYCQHSRDLPLTFGGGTKVEIK

[spacer (SEQ ID NO: 1518)] [PM1 PM09 2001 (SEQ ID NO: 1500)] nucleotide sequence:

(SEQ ID NO: 1501)

[CAAGGCCAGTCTGGCCAA][AAGCTTACTGAGGATTTTTCTAGCGCAGC
AGGCTCGAGCGGCGGCTCTATCTCTTCCGGACTGCTGTCCGGCAGATCCG
ACAATCACGGCGGATCCGAGATCGTGCTGACACAGAGCCCTGCCACCCTG
TCTCTGAGCCCTGGCGAAAGAGCCACCCTGAGCTGTAGAGCCTCTAAGGG
CGTGTCCACCAGCGGCTACAGCTACCTGCACTGGTATCAGCAGAAGCCCG
GCCAGGCCCCCAGACTGCTGATCTACCTGGCCTCCTACCTGGAAAGCGGC
GTGCCCGCCAGATTTTCTGGCTCTGGCAGCGGCACCGACTTCACCCTGAC
AATCAGCAGCCTGGAACCCGAGGACTTCGCCGTGTACTACTGCCAGCACA
GCAGGGACCTGCCCCTGACATTTGGCGGAGGCACCAAGGTGGAAATC
AAG]

[spacer (SEQ ID NO: 362)] [PM1 PM10 2001 (SEQ ID NO: 1502)] amino acid sequence:

(SEQ ID NO: 1503)

[QGQSGQG][VGQSCFSGLVCDRQLGGGSSGGSISSGLLSGRSDNHGGSE
IVLTQSPATLSLSPGERATLSCRASKGVSTSGYSYLHWYQQKPGQAPRLL
IYLASYLESGVPARFSGSGSGTDFTLTISSLEPEDFAVYYCQHSRDLPLT
FGGGTKVEIK]

PM1 PM10 2001 amino acid sequence:

(SEQ ID NO: 1502)

VGQSCFSGLVCDRQLGGGSSGGSISSGLLSGRSDNHGGSEIVLTQSPATL
SLSPGERATLSCRASKGVSTSGYSYLHWYQQKPGQAPRLLIYLASYLESG
VPARFSGSGSGTDFTLTISSLEPEDFAVYYCQHSRDLPLTFGGGTKVEIK

[spacer (SEQ ID NO: 918)] [PM1 PM10 2001 (SEQ ID NO: 1504)] nucleotide sequence:

(SEQ ID NO: 1505)

[CAAGGCCAGTCTGGCCAAGGT][GTGGGGCAGAGTTGCTTTTCTGGGCT
GGTTTGCGATAGGCAGCTGGGAGGTGGCTCGAGCGGCGGCTCTATCTCTT
CCGGACTGCTGTCCGGCAGATCCGACAATCACGGCGGATCCGAGATCGTG
CTGACACAGAGCCCTGCCACCCTGTCTCTGAGCCCTGGCGAAAGAGCCAC
CCTGAGCTGTAGAGCCTCTAAGGGCGTGTCCACCAGCGGCTACAGCTACC
TGCACTGGTATCAGCAGAAGCCCGGCCAGGCCCCCAGACTGCTGATCTAC
CTGGCCTCCTACCTGGAAAGCGGCGTGCCCGCCAGATTTTCTGGCTCTGG
CAGCGGCACCGACTTCACCCTGACAATCAGCAGCCTGGAACCCGAGGACT
TCGCCGTGTACTACTGCCAGCACAGCAGGGACCTGCCCCTGACATTTGGC
GGAGGCACCAAGGTGGAAATCAAG]

[spacer (SEQ ID NO: 913)] [PM1 PM11 2001 (SEQ ID NO: 1506)] amino acid sequence:

(SEQ ID NO: 1507)

[QGQSGQ][ISHYCFSGKSCRDGSSGGSISSGLLSGRSDNHGGSEIVLTQ
SPATLSLSPGERATLSCRASKGVSTSGYSYLHWYQQKPGQAPRLLIYLAS
YLESGVPARFSGSGSGTDFTLTISSLEPEDFAVYYCQHSRDLPLTFGGGT
KVEIK]

PM1 PM11 2001 amino acid sequence:

(SEQ ID NO: 1506)

ISHYCFSGKSCRDGSSGGSISSGLLSGRSDNHGGSEIVLTQSPATLSLSP
GERATLSCRASKGVSTSGYSYLHWYQQKPGQAPRLLIYLASYLESGVPAR
FSGSGSGTDFTLTISSLEPEDFAVYYCQHSRDLPLTFGGGTKVEIK

[spacer (SEQ ID NO: 1518)] [PM1 PM11 2001 (SEQ ID NO: 1508)] nucleotide sequence:

(SEQ ID NO: 1509)

[CAAGGCCAGTCTGGCCAA][ATCTCTCACTATTGTTTCAGTGGCAAATC
CTGCAGGGACGGCTCGAGCGGCGGCTCTATCTCTTCCGGACTGCTGTCCG
GCAGATCCGACAATCACGGCGGATCCGAGATCGTGCTGACACAGAGCCCT
GCCACCCTGTCTCTGAGCCCTGGCGAAAGAGCCACCCTGAGCTGTAGAGC
CTCTAAGGGCGTGTCCACCAGCGGCTACAGCTACCTGCACTGGTATCAGC
AGAAGCCCGGCCAGGCCCCCAGACTGCTGATCTACCTGGCCTCCTACCTG
GAAAGCGGCGTGCCCGCCAGATTTTCTGGCTCTGGCAGCGGCACCGACTT
CACCCTGACAATCAGCAGCCTGGAACCCGAGGACTTCGCCGTGTACTACT
GCCAGCACAGCAGGGACCTGCCCCTGACATTTGGCGGAGGCACCAAGGTG
GAAATCAAG]

[spacer (SEQ ID NO: 362)] [PM1 PM12 2001 (SEQ ID NO: 1510)] amino acid sequence:

(SEQ ID NO: 1511)

[QGQSGQG][HCIPDFTSAAGDCMRGGGSSGGSISSGLLSGRSDNHGGSE
IVLTQSPATLSLSPGERATLSCRASKGVSTSGYSYLHWYQQKPGQAPRLL
IYLASYLESGVPARFSGSGSGTDFTLTISSLEPEDFAVYYCQHSRDLPLT
FGGGTKVEIK]

PM1 PM12 2001 amino acid sequence:

(SEQ ID NO: 1510)

HCIPDFTSAAGDCMRGGGSSGGSISSGLLSGRSDNHGGSEIVLTQSPATL
SLSPGERATLSCRASKGVSTSGYSYLHWYQQKPGQAPRLLIYLASYLESG
VPARFSGSGSGTDFTLTISSLEPEDFAVYYCQHSRDLPLTFGGGTKVEIK

[spacer (SEQ ID NO: 918)] [PM1 PM12 2001 (SEQ ID NO: 1512)] nucleotide sequence:

(SEQ ID NO: 1513)

[CAAGGCCAGTCTGGCCAAGGT][CATTGCATTCCTGATTTTACTTCTGC
TGCTGGTGATTGCATGAGGGGAGGTGGCTCGAGCGGCGGCTCTATCTCTT
CCGGACTGCTGTCCGGCAGATCCGACAATCACGGCGGATCCGAGATCGTG
CTGACACAGAGCCCTGCCACCCTGTCTCTGAGCCCTGGCGAAAGAGCCAC
CCTGAGCTGTAGAGCCTCTAAGGGCGTGTCCACCAGCGGCTACAGCTACC
TGCACTGGTATCAGCAGAAGCCCGGCCAGGCCCCCAGACTGCTGATCTAC
CTGGCCTCCTACCTGGAAAGCGGCGTGCCCGCCAGATTTTCTGGCTCTGG
CAGCGGCACCGACTTCACCCTGACAATCAGCAGCCTGGAACCCGAGGACT
TCGCCGTGTACTACTGCCAGCACAGCAGGGACCTGCCCCTGACATTTGGC
GGAGGCACCAAGGTGGAAATCAAG]

PM1 HC variable

(SEQ ID NO: 1514)

[sequence omitted]

PM1 HC variable

(SEQ ID NO: 1515)

CAGGTGCAGCTGGTGCAGTCTGGCGTGGAAGTGAAGAAACCAGGCGCCAG
CGTGAAGGTGTCCTGCAAGGCCAGCGGCTACACCTTTACCAACTACTACA
TGTACTGGGTGCGCCAGGCCCCAGGCCAGGGACTGGAATGGATGGGCGGC
ATCAACCCCAGCAACGGCGGCACCAACTTCAACGAGAAGTTCAAGAACAG
AGTGACCCTGACCACCGACAGCAGCACCACCACCGCCTACATGGAACTGA
AGTCCCTGCAGTTCGACGACACCGCCGTGTACTACTGCGCCAGACGGGAC
TACAGATTCGACATGGGCTTCGACTACTGGGGCCAGGGCACAACCGTGAC
CGTGTCTAGT

### Example 24

### Characterization of Activatable Anti-PD1 PM1 Antibodies

[0904] This example describes activatable anti-PD1 PM1 antibodies with reduced binding to hPD1.

[0905] Masking efficiencies were evaluated by standard plate ELISA. Briefly, human PD1-Fc (Rand D systems, Minneapolis, Minn.) was adsorbed to the wells of a 96-well ELISA plate. Purified PM1 and activatable PM1 antibodies were applied to the plate in serial dilution and allowed to bind. Bound antibody and activatable antibodies were detected with anti-hu Fab-HRP conjugate (Sigma, St Louis, Mo.) and visualized with the chromogenic substrate TMB (Thermo Scientific, Rockford, Ill.). Plots were generated in Prizm (Sigma Plot). All activatable PM1 antibodies showed decreased binding compared with the parental PM1, as shown in FIGS. 27A, 27B, and 27C.

### Example 25

### Characterization of Anti-PD1 Activatable Antibodies of the Disclosure

[0906] The binding properties of several masking moieties of the disclosure identified for A1.5 (PD), NV1 (NV) and PM1 (PM) antibodies were evaluated. Eight peptide clones from each mask discovery effort were grown overnight at 37° C., 850 rpm in 2 mL deep well plates in LB+Chloramphenicol+0.2% glucose, diluted 1:20 in LB+Chloramphenicol and grown 105 minutes at 37° C., 850 rpm. Peptide expression was induced by the addition of 0.04% arabinose for 35 minutes, and clones were stained with 1 nM A1.5-DyLight 650, 1 nM PM1-Dylight 650 and 1 nM NV1-Dylight 650 in cold PBS+0.5% BSA. Clones were pelleted, the staining solution was removed, and cells were resuspended in PBS+1% formaldehyde. Fluorescence was measured on a MACSQuant Analyzer 10 flow cytometer manufactured by Miltenyi Biotec, Inc. (San Diego, Calif.). As shown in FIG. 28, masking moieties bound to the anti-PD1 antibody used in the library screening from which they were identified.

### Example 26

### Evaluation of Masking Moiety Binding by Effector Negative Activatable Antibodies

[0907] This example describes additional activatable anti-PD-1 J43 antibodies that exhibit reduced binding to mouse PD-1.

[0908] Examples of additional activatable antibodies of the disclosure comprising an IgG2a effector negative (EN) anti-PD1 antibody J43 (J43 m2a EN) and a variety of mask and substrate combinations were produced using techniques as described herein. The amino acid and nucleic acid sequences of the constant region of the IgG2a EN antibody are provided below. A plasmid encoding this effector negative Fc region, pFUSE-mIgG2Ae1-Fc, is available from InvivoGen, San Diego, Calif. The Fc region of mIgG2a was engineered by mutating the following amino acids to reduce binding to FcR and C1q: L235E and E318A/K320A/K322A.

>mIgG2a EN

(SEQ ID NO: 1516)

AKTTAPSVYPLAPVCGDTTGSSVTLGCLVKGYFPEPVTLTWNSGSLSSGV
HTFPAVLQSDLYTLSSSVTVTSSTWPSQSITCNVAHPASSTKVDKKIEPR
GPTIKPCPPCKCPAPNLEGGPSVFIFPPKIKDVLMISLSPIVTCVVVDVS
EDDPDVQISWFVNNVEVHTAQTQTHREDYNSTLRVVSALPIQHQDWMSGK
AFACAVNNKDLPAPIERTISKPKGSVRAPQVYVLPPPEEEMTKKQVTLTC
MVTDFMPEDIYVEWTNNGKTELNYKNTEPVLDSDGSYFMYSKLRVEKKNW
VERNSYSCSVVHEGLHNHHTTKSFSRTPGK

>mIgG2a EN

(SEQ ID NO: 1517)

GCCAAGACAACAGCCCCCAGCGTGTACCCTCTGGCCCCTGTGTGTGGCGA
TACCACAGGCAGCTCTGTGACCCTGGGCTGCCTCGTGAAGGGCTACTTCC
CTGAGCCAGTGACCCTGACCTGGAACAGCGGCTCTCTGTCTAGCGGCGTG
CACACCTTTCCAGCCGTGCTGCAGAGCGACCTGTACACCCTGAGCAGCAG
CGTGACCGTGACCAGCAGCACATGGCCCAGCCAGAGCATCACCTGTAACG
TGGCCCACCCTGCCAGCTCCACCAAGGTGGACAAGAAGATCGAGCCCAGA
GGCCCCACCATCAAGCCTTGCCCCCCTTGCAAATGCCCTGCCCCCAATCT
GGAAGGCGGCCCTAGCGTGTTCATCTTCCCACCCAAGATCAAGGACGTGC
TGATGATCAGCCTGAGCCCCATCGTGACCTGCGTGGTGGTGGACGTGTCC
GAGGACGACCCCGATGTGCAGATCAGTTGGTTCGTGAACAACGTGGAAGT
GCACACCGCCCAGACCCAGACACACAGAGAGGACTACAACAGCACCCTGA
GAGTGGTGTCCGCCCTGCCCATCCAGCACCAGGATTGGATGAGCGGCAAG
GCCTTCGCCTGCGCTGTGAACAACAAGGACCTGCCAGCCCCCATCGAGCG
GACCATCTCTAAGCCTAAGGGCAGCGTGCGGGCTCCCCAGGTGTACGTGC
TGCCTCCTCCAGAGGAAGAGATGACCAAGAAACAAGTGACACTGACATGC
ATGGTCACCGACTTCATGCCCGAGGACATCTACGTGGAATGGACCAACAA
CGGCAAGACCGAGCTGAACTACAAGAACACCGAGCCCGTGCTGGACAGCG
ACGGCAGCTACTTCATGTACAGCAAGCTGCGGGTGGAAAAGAAAAACTGG
GTGGAACGGAACAGCTACAGCTGCAGCGTGGTGCACGAGGGCCTGCACAA
TCACCACACCACCAAGAGCTTCAGCCGGACCCCTGGAAAA

[0909] Masking efficiencies of several of these activatable antibodies were determined as described herein. The results are shown in FIG. 29A and FIG. 29B.

### J43m2a EN Activatable Antibody LCs:

[0910] [spacer (SEQ ID NO: 362)] [J43m2a EN MP8-2 2001 (SEQ ID NO: 1808)] amino acid sequence:

(SEQ ID NO: 1809)

[QGQSGQG][ACRICQDHPATKWNSGGGSSGGSISSGLLSGRSDNHGGGS
YELTQPPSASVNVGETVKITCSGDQLPKYFADWFHQRSDQTILQVIYDDN
KRPSGIPERISGSSSGTTATLTIRDVRAEDEGDYYCFSGYVDSDSKLYVF
GSGTQLTVLGGPKSSPKVTVFPPSPEELRTNKATLVCLVNDFYPGSATVT
WKANGATINDGVKTTKPSKQGQNYMTSSYLSLTADQWKSHNRVSCQVTHE
GETVEKSLSPAECL]

J43m2a EN MP8-2 2001 amino acid sequence:

(SEQ ID NO: 1808)

ACRICQDHPATKWNSGGGSSGGSISSGLLSGRSDNHGGGSYELTQPPSAS
VNVGETVKITCSGDQLPKYFADWFHQRSDQTILQVIYDDNKRPSGIPERI
SGSSSGTTATLTIRDVRAEDEGDYYCFSGYVDSDSKLYVFGSGTQLTVLG
GPKSSPKVTVFPPSPEELRTNKATLVCLVNDFYPGSATVTWKANGATIND
GVKTTKPSKQGQNYMTSSYLSLTADQWKSHNRVSCQVTHEGETVEKSLSP
AECL

[spacer (SEQ ID NO: 362)] [J43m2a EN MP8-2 2011 (SEQ ID NO: 1810)] amino acid sequence:

(SEQ ID NO: 1811)

[QGQSGQG][ACRICQDHPATKWNSGGGSSGGSISSGLLSGRSDNPGGGS
YELTQPPSASVNVGETVKITCSGDQLPKYFADWFHQRSDQTILQVIYDDN
KRPSGIPERISGSSSGTTATLTIRDVRAEDEGDYYCFSGYVDSDSKLYVF
GSGTQLTVLGGPKSSPKVTVFPPSPEELRTNKATLVCLVNDFYPGSATVT
WKANGATINDGVKTTKPSKQGQNYMTSSYLSLTADQWKSHNRVSCQVTHE
GETVEKSLSPAECL]

J43m2a EN MP8-2 2011 amino acid sequence:

(SEQ ID NO: 1810)

ACRICQDHPATKWNSGGGSSGGSISSGLLSGRSDNPGGGSYELTQPPSAS
VNVGETVKITCSGDQLPKYFADWFHQRSDQTILQVIYDDNKRPSGIPERI
SGSSSGTTATLTIRDVRAEDEGDYYCFSGYVDSDSKLYVFGSGTQLTVLG
GPKSSPKVTVFPPSPEELRTNKATLVCLVNDFYPGSATVTWKANGATIND
GVKTTKPSKQGQNYMTSSYLSLTADQWKSHNRVSCQVTHEGETVEKSLSP
AECL

[spacer (SEQ ID NO: 362)] [J43m2a EN MP8-2 2012 (SEQ ID NO: 1812)] amino acid sequence:

(SEQ ID NO: 1813)

[QGQSGQG][ACRICQDHPATKWNSGGGSSGGSISSGLLSGRSANPGGGS
YELTQPPSASVNVGETVKITCSGDQLPKYFADWFHQRSDQTILQVIYDDN
KRPSGIPERISGSSSGTTATLTIRDVRAEDEGDYYCFSGYVDSDSKLYVF
GSGTQLTVLGGPKSSPKVTVFPPSPEELRTNKATLVCLVNDFYPGSATVT
WKANGATINDGVKTTKPSKQGQNYMTSSYLSLTADQWKSHNRVSCQVTHE
GETVEKSLSPAECL]

J43m2a EN MP8-2 2012 amino acid sequence:

(SEQ ID NO: 1812)

ACRICQDHPATKWNSGGGSSGGSISSGLLSGRSANPGGGSYELTQPPSAS
VNVGETVKITCSGDQLPKYFADWFHQRSDQTILQVIYDDNKRPSGIPERI
SGSSSGTTATLTIRDVRAEDEGDYYCFSGYVDSDSKLYVFGSGTQLTVLG
GPKSSPKVTVFPPSPEELRTNKATLVCLVNDFYPGSATVTWKANGATIND
GVKTTKPSKQGQNYMTSSYLSLTADQWKSHNRVSCQVTHEGETVEKSLSP
AECL

[spacer (SEQ ID NO: 362)] [J43m2a EN MP8-2 2002 (SEQ ID NO: 1814)] amino acid sequence:

(SEQ ID NO: 1815)

[QGQSGQG][ACRICQDHPATKWNSGGGSSGGSISSGLLSGRSGNHGGGS
YELTQPPSASVNVGETVKITCSGDQLPKYFADWFHQRSDQTILQVIYDDN
KRPSGIPERISGSSSGTTATLTIRDVRAEDEGDYYCFSGYVDSDSKLYVF
GSGTQLTVLGGPKSSPKVTVFPPSPEELRTNKATLVCLVNDFYPGSATVT
WKANGATINDGVKTTKPSKQGQNYMTSSYLSLTADQWKSHNRVSCQVTHE
GETVEKSLSPAECL]

J43m2a EN MP8-2 2002 amino acid sequence:

(SEQ ID NO: 1814)

ACRICQDHPATKWNSGGGSSGGSISSGLLSGRSGNHGGGSYELTQPPSAS
VNVGETVKITCSGDQLPKYFADWFHQRSDQTILQVIYDDNKRPSGIPERI
SGSSSGTTATLTIRDVRAEDEGDYYCFSGYVDSDSKLYVFGSGTQLTVLG
GPKSSPKVTVFPPSPEELRTNKATLVCLVNDFYPGSATVTWKANGATIND
GVKTTKPSKQGQNYMTSSYLSLTADQWKSHNRVSCQVTHEGETVEKSLSP
AECL

[spacer (SEQ ID NO: 362)] [J43m2a EN MP8-2 2003 (SEQ ID NO: 1816)] amino acid sequence:

(SEQ ID NO: 1817)

[QGQSGQG][ACRICQDHPATKWNSGGGSSGGSISSGLLSGRSANPRGGG
GSYELTQPPSASVNVGETVKITCSGDQLPKYFADWFHQRSDQTILQVIYD
DNKRPSGIPERISGSSSGTTATLTIRDVRAEDEGDYYCFSGYVDSDSKLY
VFGSGTQLTVLGGPKSSPKVTVFPPSPEELRTNKATLVCLVNDFYPGSAT
VTWKANGATINDGVKTTKPSKQGQNYMTSSYLSLTADQWKSHNRVSCQVT
HEGETVEKSLSPAECL]

J43m2a EN MP8-2 2003 amino acid sequence:

(SEQ ID NO: 1816)

ACRICQDHPATKWNSGGGSSGGSISSGLLSGRSANPRGGGGSYELTQPPS
ASVNVGETVKITCSGDQLPKYFADWFHQRSDQTILQVIYDDNKRPSGIPE
RISGSSSGTTATLTIRDVRAEDEGDYYCFSGYVDSDSKLYVFGSGTQLTV
LGGPKSSPKVTVFPPSPEELRTNKATLVCLVNDFYPGSATVTWKANGATI
NDGVKTTKPSKQGQNYMTSSYLSLTADQWKSHNRVSCQVTHEGETVEKSL
SPAECL

[spacer (SEQ ID NO: 362)] [J43m2a EN MP8-2 2006 (SEQ ID NO: 1818)] amino acid sequence:

(SEQ ID NO: 1819)

[QGQSGQG][ACRICQDHPATKWNSGGGSSGGSISSGLLSGRSDDHGGGS
YELTQPPSASVNVGETVKITCSGDQLPKYFADWFHQRSDQTILQVIYDDN
KRPSGIPERISGSSSGTTATLTIRDVRAEDEGDYYCFSGYVDSDSKLYVF
GSGTQLTVLGGPKSSPKVTVFPPSPEELRTNKATLVCLVNDFYPGSATVT
WKANGATINDGVKTTKPSKQGQNYMTSSYLSLTADQWKSHNRVSCQVTHE
GETVEKSLSPAECL]

J43m2a EN MP8-2 2006 amino acid sequence:

(SEQ ID NO: 1818)

ACRICQDHPATKWNSGGGSSGGSISSGLLSGRSDDHGGGSYELTQPPSAS
VNVGETVKITCSGDQLPKYFADWFHQRSDQTILQVIYDDNKRPSGIPERI
SGSSSGTTATLTIRDVRAEDEGDYYCFSGYVDSDSKLYVFGSGTQLTVLG
GPKSSPKVTVFPPSPEELRTNKATLVCLVNDFYPGSATVTWKANGATIND
GVKTTKPSKQGQNYMTSSYLSLTADQWKSHNRVSCQVTHEGETVEKSLSP
AECL

[spacer (SEQ ID NO: 362)] [J43m2a EN MP8-2 2007 (SEQ ID NO: 1820)] amino acid sequence:

(SEQ ID NO: 1821)

[QGQSGQG][ACRICQDHPATKWNSGGGSSGGSISSGLLSGRSDIHGGGS
YELTQPPSASVNVGETVKITCSGDQLPKYFADWFHQRSDQTILQVIYDDN
KRPSGIPERISGSSSGTTATLTIRDVRAEDEGDYYCFSGYVDSDSKLYVF
GSGTQLTVLGGPKSSPKVTVFPPSPEELRTNKATLVCLVNDFYPGSATVT
WKANGATINDGVKTTKPSKQGQNYMTSSYLSLTADQWKSHNRVSCQVTHE
GETVEKSLSPAECL]

J43m2a EN MP8-2 2007 amino acid sequence:

(SEQ ID NO: 1820)

ACRICQDHPATKWNSGGGSSGGSISSGLLSGRSDIHGGGSYELTQPPSAS
VNVGETVKITCSGDQLPKYFADWFHQRSDQTILQVIYDDNKRPSGIPERI
SGSSSGTTATLTIRDVRAEDEGDYYCFSGYVDSDSKLYVFGSGTQLTVLG
GPKSSPKVTVFPPSPEELRTNKATLVCLVNDFYPGSATVTWKANGATIND
GVKTTKPSKQGQNYMTSSYLSLTADQWKSHNRVSCQVTHEGETVEKSLSP
AECL

[spacer (SEQ ID NO: 362)] [J43m2a EN MP8-2 2008 (SEQ ID NO: 1822)] amino acid sequence:

(SEQ ID NO: 1823)

[QGQSGQG][ACRICQDHPATKWNSGGGSSGGSISSGLLSGRSDQHGGGS
YELTQPPSASVNVGETVKITCSGDQLPKYFADWFHQRSDQTILQVIYDDN
KRPSGIPERISGSSSGTTATLTIRDVRAEDEGDYYCFSGYVDSDSKLYVF
GSGTQLTVLGGPKSSPKVTVFPPSPEELRTNKATLVCLVNDFYPGSATVT
WKANGATINDGVKTTKPSKQGQNYMTSSYLSLTADQWKSHNRVSCQVTHE
GETVEKSLSPAECL]

J43m2a EN MP8-2 2008 amino acid sequence:

(SEQ ID NO: 1822)

ACRICQDHPATKWNSGGGSSGGSISSGLLSGRSDQHGGGSYELTQPPSAS
VNVGETVKITCSGDQLPKYFADWFHQRSDQTILQVIYDDNKRPSGIPERI
SGSSSGTTATLTIRDVRAEDEGDYYCFSGYVDSDSKLYVFGSGTQLTVLG
GPKSSPKVTVFPPSPEELRTNKATLVCLVNDFYPGSATVTWKANGATIND
GVKTTKPSKQGQNYMTSSYLSLTADQWKSHNRVSCQVTHEGETVEKSLSP
AECL

[spacer (SEQ ID NO: 362)] [J43m2a EN MP8-2 2009 (SEQ ID NO: 1824)] amino acid sequence:

(SEQ ID NO: 1825)

[QGQSGQG][ACRICQDHPATKWNSGGGSSGGSISSGLLSGRSDTHGGGS
YELTQPPSASVNVGETVKITCSGDQLPKYFADWFHQRSDQTILQVIYDDN
KRPSGIPERISGSSSGTTATLTIRDVRAEDEGDYYCFSGYVDSDSKLYVF
GSGTQLTVLGGPKSSPKVTVFPPSPEELRTNKATLVCLVNDFYPGSATVT
WKANGATINDGVKTTKPSKQGQNYMTSSYLSLTADQWKSHNRVSCQVTHE
GETVEKSLSPAECL]

J43m2a EN MP8-2 2009 amino acid sequence:

(SEQ ID NO: 1824)

ACRICQDHPATKWNSGGGSSGGSISSGLLSGRSDTHGGGSYELTQPPSAS
VNVGETVKITCSGDQLPKYFADWFHQRSDQTILQVIYDDNKRPSGIPERI
SGSSSGTTATLTIRDVRAEDEGDYYCFSGYVDSDSKLYVFGSGTQLTVLG
GPKSSPKVTVFPPSPEELRTNKATLVCLVNDFYPGSATVTWKANGATIND
GVKTTKPSKQGQNYMTSSYLSLTADQWKSHNRVSCQVTHEGETVEKSLSP
AECL

[spacer (SEQ ID NO: 362)] [J43m2a EN MP8-2 2010 (SEQ ID NO: 1826)] amino acid sequence:

(SEQ ID NO: 1827)

[QGQSGQG][ACRICQDHPATKWNSGGGSSGGSISSGLLSGRSDYHGGGS
YELTQPPSASVNVGETVKITCSGDQLPKYFADWFHQRSDQTILQVIYDDN
KRPSGIPERISGSSSGTTATLTIRDVRAEDEGDYYCFSGYVDSDSKLYVF
GSGTQLTVLGGPKSSPKVTVFPPSPEELRTNKATLVCLVNDFYPGSATVT
WKANGATINDGVKTTKPSKQGQNYMTSSYLSLTADQWKSHNRVSCQVTHE
GETVEKSLSPAECL]

J43m2a EN MP8-2 2010 amino acid sequence:

(SEQ ID NO: 1826)

ACRICQDHPATKWNSGGGSSGGSISSGLLSGRSDYHGGGSYELTQPPSAS
VNVGETVKITCSGDQLPKYFADWFHQRSDQTILQVIYDDNKRPSGIPERI
SGSSSGTTATLTIRDVRAEDEGDYYCFSGYVDSDSKLYVFGSGTQLTVLG
GPKSSPKVTVFPPSPEELRTNKATLVCLVNDFYPGSATVTWKANGATIND
GVKTTKPSKQGQNYMTSSYLSLTADQWKSHNRVSCQVTHEGETVEKSLSP
AECL

[spacer (SEQ ID NO: 362)] [J43m2a EN MP8-2 2013 (SEQ ID NO: 1828)] amino acid sequence:

(SEQ ID NO: 1829)

[QGQSGQG][ACRICQDHPATKWNSGGGSSGGSISSGLLSGRSANIGGGS
YELTQPPSASVNVGETVKITCSGDQLPKYFADWFHQRSDQTILQVIYDDN
KRPSGIPERISGSSSGTTATLTIRDVRAEDEGDYYCFSGYVDSDSKLYVF
GSGTQLTVLGGPKSSPKVTVFPPSPEELRTNKATLVCLVNDFYPGSATVT
WKANGATINDGVKTTKPSKQGQNYMTSSYLSLTADQWKSHNRVSCQVTHE
GETVEKSLSPAECL]

J43m2a EN MP8-2 2013 amino acid sequence:

(SEQ ID NO: 1828)

ACRICQDHPATKWNSGGGSSGGSISSGLLSGRSANIGGGSYELTQPPSAS
VNVGETVKITCSGDQLPKYFADWFHQRSDQTILQVIYDDNKRPSGIPERI
SGSSSGTTATLTIRDVRAEDEGDYYCFSGYVDSDSKLYVFGSGTQLTVLG
GPKSSPKVTVFPPSPEELRTNKATLVCLVNDFYPGSATVTWKANGATIND
GVKTTKPSKQGQNYMTSSYLSLTADQWKSHNRVSCQVTHEGETVEKSLSP
AECL

[spacer (SEQ ID NO: 362)] [J43m2a EN MP8-2 2014 (SEQ ID NO: 1830)] amino acid sequence:

(SEQ ID NO: 1831)

[QGQSGQG][ACRICQDHPATKWNSGGGSSGGSISSGLLSGRSDNIGGGS
YELTQPPSASVNVGETVKITCSGDQLPKYFADWFHQRSDQTILQVIYDDN
KRPSGIPERISGSSSGTTATLTIRDVRAEDEGDYYCFSGYVDSDSKLYVF
GSGTQLTVLGGPKSSPKVTVFPPSPEELRTNKATLVCLVNDFYPGSATVT
WKANGATINDGVKTTKPSKQGQNYMTSSYLSLTADQWKSHNRVSCQVTHE
GETVEKSLSPAECL]

J43m2a EN MP8-2 2014 amino acid sequence:

(SEQ ID NO: 1830)

ACRICQDHPATKWNSGGGSSGGSISSGLLSGRSDNIGGGSYELTQPPSAS
VNVGETVKITCSGDQLPKYFADWFHQRSDQTILQVIYDDNKRPSGIPERI
SGSSSGTTATLTIRDVRAEDEGDYYCFSGYVDSDSKLYVFGSGTQLTVLG
GPKSSPKVTVFPPSPEELRTNKATLVCLVNDFYPGSATVTWKANGATIND
GVKTTKPSKQGQNYMTSSYLSLTADQWKSHNRVSCQVTHEGETVEKSLSP
AECL

### Example 27

### Activatable Anti-Mouse PD1 J43 m2a EN Antibodies Reduce Incidence of Diabetes in NOD Mice

[0911] In this Example, anti-PD1 J43 m2a EN (effector negative) activatable antibodies were analyzed for the ability to protect from PD1 m2a EN-mediated induction of diabetes in NOD mice.

[0912] The NOD mice, substrain NOD/ShiLtJ, were obtained from Jackson Laboratory at 8 weeks and acclimated on site for 2 weeks. At 10 weeks, mice were checked for diabetes prior to enrollment, grouped, and dosed as set forth in Table 21.

| | | | | | Dose | | |
|---|---|---|---|---|---|---|---|
| | | | | Dose | volume | | |
| Group | Count | Gender | Treatment | (mg/kg) | (mL/kg) | Schedule | Route |
| 1 | 7 | F | mIgG2a (C1.18.4) | 10 | 10 | q7dx1 | IP |
| 2 | 7 | F | Anti-PD-1 J43 m2a EN | 10 | 10 | q7dx1 | IP |
| 3 | 7 | F | Anti-PD-1 J43 m2a EN | 3 | 10 | q7dx1 | IP |
| 4 | 7 | F | Anti-PD-1 J43 m2a EN | 1 | 10 | q7dx1 | IP |
| 5 | 7 | F | J43 MP7-1 2001 m2a EN | 10 | 10 | q7dx1 | IP |
| 6 | 7 | F | J43 MP7-1 2001 m2a EN | 3 | 10 | q7dx1 | IP |
| 7 | 7 | F | J43 MP8-2 2001 m2a EN | 10 | 10 | q7dx1 | IP |
| 8 | 7 | F | J43 MP8-2 2001 m2a EN | 3 | 10 | q7dx1 | IP |

[0913] FIG. 30 which plots % non-diabetic versus number of days post dose, shows that anti-PD-1 J43 antibody induced diabetes in NOD mice with increased frequency as dosage increased. At day eleven post dose, the percentage of non-diabetic mice for the antibody-treated groups was 29%, 43% and 71% for the 10 mg/kg, 3 mg/kg and 1 mg/kg dose groups, respectively. Activatable antibodies J43 MP7-1 2001 m2a EN and J43 MP8-2 2001 m2a EN required increased doses to induce diabetes at frequencies comparable to the parental antibody. At day eleven post dose with J43 MP7-1 2001 m2a EN, 71% of the 10 mg/kg group remained non-diabetic and 86% of the 3 mg/kg were non-diabetic. At day fourteen post dose with J43 MP8-2 2001 m2a EN, 86% of the 10 mg/kg group and 100% of the 3 mg/kg group remained non-diabetic.

### Example 28

### Activatable Anti-Mouse PD1 J43 m2a EN Antibodies Show Efficacy in the MC38 Syngeneic Tumor Model

[0914] This Example demonstrates that activatable antibodies of the embodiments are able to reduce the growth of MC38 syngeneic tumors.

[0915] In this Example, anti-PD1 activatable antibodies J43 MP7-1 2001 m2a EN and J43 MP8-2 2001 m2a EN were analyzed for the ability to reduce the growth of MC38 syngeneic tumors.

[0916] The mouse colon carcinoma cell line MC38 was obtained from ATCC. MC38 were grown in RPMI-1640 supplemented with 10% fetal bovine serum at 37° C. in an atmosphere of 5% CO₂ in air. Cells were harvested during the logarithmic growth period, resuspended in PBS with proper cell concentration, and kept on ice for tumor induction.

[0917] Each mouse was inoculated subcutaneously at the right flank with 1.5×10⁶ of MC38 cells in PBS for tumor development. The treatments were started when the mean tumor size reached approximately 80 mm³ (60-120 mm³). Tumor sizes were measured twice weekly in two dimensions using a caliper, and the volume was expressed in mm³ using the formula: V=0.5a×b² where a and b are the long and short diameters of the tumor, respectively.

[0918] The mice were grouped and dosed as set forth in Table 22.

TABLE 22

| | | | Dose | Dose volume | | |
|---|---|---|---|---|---|---|
| Group | Count | Treatment | (mg/kg) | (mL/kg) | Schedule | Route |
| 1 | 10 | mIgG1 MOPC-21 + mIgG12b | 10 + 10 | 10 | b.i.w. for | IP |
| | | MPC-11 | | | 3 weeks | |
| 2 | 10 | Anti-CTLA4 9D9 mIgG2b | 10 | 10 | b.i.w. for | IP |
| | | | | | 3 weeks | |
| 3 | 10 | Anti-PD-1 (J43 m2a EN) | 10 | 10 | b.i.w. for | IP |
| | | | | | 3 weeks | |
| 4 | 10 | J43 MP8-2 2001 m2a EN | 10 | 10 | b.i.w. for | IP |
| | | | | | 3 weeks | |
| 5 | 10 | J43 MP7-1 2001 m2a EN | 10 | 10 | b.i.w. for | IP |
| | | | | | 3 weeks | |
| 6 | 10 | Anti-PD-1 (J43 m2a EN) + | 10 + 10 | 10 | b.i.w. for | IP |
| | | Anti-CTLA4 9D9 mIgG2b | | | 3 weeks | |
| 7 | 10 | J43 MP8-2 2001 m2a EN + | 10 + 10 | 10 | b.i.w. for | IP |
| | | Anti-CTLA4 9D9 mIgG2b | | | 3 weeks | |
| 8 | 10 | J43 MP7-1 2001 m2a EN + | 10 + 10 | 10 | b.i.w. for | IP |
| | | Anti-CTLA4 9D9 mIgG2b | | | 3 weeks | |

[0919] FIGS. 31A and 31B, which plots tumor volume versus number of days post initial dose, demonstrates that anti-PD1 activatable antibodies MP7-1 2001 m2a EN and MP8-2 2001 m2a EN inhibit the growth of MC38 syngeneic tumors similar to positive control anti-PD1 antibody J43 m2a EN both as single agents and in combination with anti-CTLA4 antibody 9D9 mIgG2b (BioXCell, West Lebanon, N.H.).

### Example 29

### Evaluation of Anti-Human PD1 Antibodies and Activatable Anti-Human PD1 Antibodies in Antigen Recall Assay

[0920] This Example demonstrates that anti-PD1 antibodies and activated activatable anti-PD1 antibodies of the embodiments (i.e., activatable antibodies in which the CM has been cleaved by a protease) are able to block PD-L1/PD-L2 binding to PD1 and to activate T cells in an antigen recall assay.

[0921] As shown in FIGS. 32A-32E, the anti-human PD1 antibody referred to herein as A1.5 Ab (i.e., VH of SEQ ID NO: 21 and VL of SEQ ID NO: 47) blocks PD-L1/PD-L2 binding to PD1 and potently activates T cells in an antigen recall assay. The binding of the anti-human PD-1 A1.5 Ab to immobilized human PD1 as detected by standard plate ELISA is shown in FIG. 32A, and the binding of A1.5 Ab to cynomolgus PD1 (also referred to herein as cyno-PD1, Sino Biological Cat. #90311-C02H) as detected by ELISA is shown in FIG. 32B. The inhibition of biotinylated human PD-L1 (also referred to herein as biotin-PD-L1) to immobilized PD1 by A1.5 Ab as determined by ELISA is shown in FIG. 32C, and the inhibition of biotinylated human PD-L2 (also referred to herein as biotin-PD-L2) to immobilized PD1 as determined by ELISA is shown in FIG. 32D.

[0922] As shown in FIG. 32E, the A1.5 Ab enhances IFN-γ production in a CMV T cell restimulation assay. Briefly, CMV⁺ human PBMCs were plated at 250,000 cells/well with isotype control antibody or with the A1.5 Ab and stimulated with 5 μg/mL CMV lysate for 4 days. Supernatant IFN-γ levels were measured by ELISA.

[0923] As shown in FIGS. 33A and 33B, the activatable anti-PD1 antibody referred to herein as A1.5 PD34 2001 (i.e., VH of SEQ ID NO: 21, VL of SEQ ID NO: 47, masking moiety of SEQ ID NO: 99, and cleavable moiety of SEQ ID NO: 214) binds human PD1 with decreased affinity relative to the parental PD-1 Ab, i.e., A1.5 Ab (FIG. 33A), and the A1.5 PD34 2001 activatable antibody shows functional masking in a CMV T cell antigen recall assay (FIG. 33B). Briefly, 4 mg/mL of the A1.5 PD34 2001 activatable antibody was combined with 0 μg/mL or 60 μg/mL recombinant human urokinase (rh uPA, R&D, Cat. #1310-SE) and incubated at 37° C. overnight. Binding of the activatable antibody incubated with uPA to hPD1 was assayed by standard plate ELISA. As shown in FIG. 33, the activatable anti-PD1 antibodies of the disclosure regain full binding activated after activation by a protease.

### Example 30

### Pharmacokinetic Evaluation of Activatable Anti-Human PD1 Antibodies in Non-Human Primate Model

[0924] This Example demonstrates pharmacokinetic and dose proportionality data for anti-PD-1 antibodies and anti-PD-1 activatable antibodies of the embodiments.

[0925] Briefly, female cynomolgus monkeys (n=2/group) were dosed with a single IV bolus dose of either the A1.5 antibody or the activatable antibody referred to herein as A1.5 PD34 2001 at 1 mg/kg or at 5 mg/kg. Plasma samples were analyzed for A1.5 and A1.5 PD34 2001 concentrations by a qualified anti-human sandwich ELISA. The results are shown in FIG. 34, where each line represents one individual. Mean PK parameters shown for both A1.5 and A1.5 PD34 2001. Similar results were seen for activatable antibodies A1.5 PD34 2012 and A1.5 PD34 2011 administered to cynomolgus monkeys in a similar study.

### Example 31

### Activatable Anti-Mouse PD-1 J43 Antibodies Reduce Incidence of Diabetes in NOD Mice Dosed with Anti-CTLA4 Antibody

[0926] In this Example, anti-PD-1 J43 activatable antibodies were analyzed for the ability to protect from anti-PD-1 induction of diabetes in NOD mice when dosed concurrently with anti-CTLA-4 9D9 mIgG2b antibody (BioXCell cat #BE0164). The NOD mice, substrain NOD/ShiLtJ, were obtained from Jackson Laboratory at 4 weeks and acclimated on site for 1 week. At 5 weeks, mice were checked for diabetes prior to enrollment, grouped, and dosed as set forth in Table 23. As used herein, the antibody referred to as “J43 m2a EN” (and variations thereof) comprises a heavy chain (HC) of SEQ ID NO: 546; a light chain (LC) of SEQ ID NO: 543; and a constant region of SEQ ID NO: 1516. As used herein, the activatable antibody referred to as “J43 MP8-2 2012 m2a EN” is an activatable antibody comprising the J43 m2a EN antibody, the MP8-2 masking moiety (SEQ ID NO: 549), and the 2012 substrate (SEQ ID NO: 1101), and the activatable antibody referred to as “J43 MP8-2 2001 m2a EN” is an activatable antibody comprising the J43 m2a EN antibody, the MP8-2 masking moiety (SEQ ID NO: 549), and the 2001 substrate (SEQ ID NO: 214).

TABLE 23
Dosing regimen

| | | Treatment | | | | Dose | | |
|---|---|---|---|---|---|---|---|---|
| | | | Dose | Article | Dose | volume | | |
| Group | Count | Article #1 | (mg/kg) | #2 | (mg/kg) | (mL/kg) | Schedule | Route |
| 1 | 8 | mIgG1 | 10 | mIgG2b | 10 | 10 | d0, d4, d7 | IP |
| | | MOPC-21 | | MPC-11 | | | | |
| 2 | 8 | Anti- | 10 | mIgG1 | 10 | 10 | d0, d4, d7 | IP |
| | | CTLA4 | | MOPC- | | | | |
| | | 9D9 | | 21 | | | | |
| | | mIgG2b | | | | | | |
| 3 | 8 | Anti-PD-1 | 10 | mIgG2b | 10 | 10 | d0, d4, d7 | IP |
| | | (J43 m2a | | MPC-11 | | | | |
| | | EN) | | | | | | |
| 4 | 8 | Anti-PD-1 | 1 | mIgG2b | 10 | 10 | d0, d4, d7 | IP |
| | | (J43 m2a | | MPC-11 | | | | |
| | | EN) | | | | | | |
| 5 | 8 | Anti-PD-1 | 10 | Anti- | 10 | 10 | d0, d4, d7 | IP |
| | | (J43 m2a | | CTLA4 | | | | |
| | | EN) | | 9D9 | | | | |
| | | | | mIgG2b | | | | |
| 6 | 8 | Anti-PD-1 | 1 | Anti- | 10 | 10 | d0, d4, d7 | IP |
| | | (J43 m2a | | CTLA4 | | | | |
| | | EN) | | 9D9 | | | | |
| | | | | mIgG2b | | | | |
| 7 | 8 | J43 MP8-2 | 10 | mIgG2b | 10 | 10 | d0, d4, d7 | IP |
| | | 2012 m2a | | MPC-11 | | | | |
| | | EN | | | | | | |
| 8 | 8 | J43 MP8-2 | 10 | Anti- | 10 | 10 | d0, d4, d7 | IP |
| | | 2012 m2a | | CTLA4 | | | | |
| | | EN | | 9D9 | | | | |
| | | | | mIgG2b | | | | |
| 9 | 8 | J43 MP8-2 | 10 | mIgG2b | 10 | 10 | d0, d4, d7 | IP |
| | | 2001 m2a | | MPC-11 | | | | |
| | | EN | | | | | | |
| 10 | 8 | J43 MP8-2 | 10 | Anti- | 10 | 10 | d0, d4, d7 | IP |
| | | 2001 m2a | | CTLA4 | | | | |
| | | EN | | 9D9 | | | | |
| | | | | mIgG2b | | | | |

[0927] FIG. 35 which plots % non-diabetic versus number of days post initial dose, shows that the combination of 10 mg/kg anti-PD-1 J43 antibody plus 10 mg/kg anti-CTLA-4 antibody dosed on days 0, 4 and 7 induced diabetes in 50% of NOD mice by day eleven while the same dosing schedule of activatable anti-PD-1 J43 antibodies with CTLA-4 antibody resulted in no induction of diabetes to day eighteen.

### Example 32

### Activatable Anti-Mouse PD1 J43 m2a EN Antibodies Show Enhanced Efficacy when Coadministered with Anti-CTLA4 Antibody in the MC38 Syngeneic Tumor Model

[0928] This Example demonstrates that activatable antibodies of the embodiments are able to reduce the growth of MC38 syngeneic tumors as single agents and induce MC38 tumor regression when coadministered with anti-CTLA4 antibody 9D9 mIgG2b.

[0929] In this Example, anti-PD1 activatable antibodies J43 MP8-2 2011 m2a EN and J43 MP8-2 2012 m2a EN were analyzed for the ability to slow the growth of or, in combination with anti-CTLA4 antibody, induce regression in MC38 syngeneic tumors. As used herein, the antibody referred to as “J43 m2a EN” (and variations thereof) comprises a heavy chain (HC) of SEQ ID NO: 546; a light chain (LC) of SEQ ID NO: 543; and a constant region of SEQ ID NO: 1516. As used herein, the activatable antibody referred to as “J43 MP8-2 2011 m2a EN” is an activatable antibody comprising the J43 m2a EN antibody, the MP8-2 masking moiety (SEQ ID NO: 549), and the 2011 substrate (SEQ ID NO: 1100), and the activatable antibody referred to as “J43 MP8-2 2012 m2a EN” is an activatable antibody comprising the J43 m2a EN antibody, the MP8-2 masking moiety (SEQ ID NO: 549), and the 2012 substrate (SEQ ID NO: 1101).

[0930] The mouse colon carcinoma cell line MC38 was obtained from ATCC. MC38 cells were grown in RPMI-1640 supplemented with 10% fetal bovine serum at 37° C. in an atmosphere of 5% CO₂ in air. Cells were harvested during the logarithmic growth period, resuspended in PBS with proper cell concentration, and kept on ice for tumor induction.

[0931] Each mouse was inoculated subcutaneously at the right flank with 1.5×10⁶ MC38 cells in PBS for tumor development. The treatments were started when the mean tumor size reached approximately 60 mm³ (45-80 mm³). Tumor sizes were measured twice weekly in two dimensions using a caliper, and the volume was expressed in mm³ using the formula: V=0.5a×b² where a and b are the long and short diameters of the tumor, respectively.

[0932] The mice were grouped and dosed as set forth in Table 24.

TABLE 24

| | | | | Dose | | |
|---|---|---|---|---|---|---|
| | | | Dose | volume | | |
| Group | Count | Treatment | (mg/kg) | (mL/kg) | Schedule | Route |
| 1 | 10 | mIgG1 MOPC-21 + | 10 + 10 | 10 | b.i.w. for 3 | IP |
| | | mIgG12b MPC-11 | | | weeks | |
| 2 | 10 | Anti-CTLA4 9D9 mIgG2b | 10 | 10 | b.i.w. for 3 | IP |
| | | | | | weeks | |
| 3 | 10 | Anti-PD-1 (J43 m2a EN) | 10 | 10 | b.i.w. for 3 | IP |
| | | | | | weeks | |
| 4 | 10 | J43 MP8-2 2012 m2a EN | 10 | 10 | b.i.w. for 3 | IP |
| | | | | | weeks | |
| 5 | 10 | J43 MP8-2 2011 m2a EN | 10 | 10 | b.i.w. for 3 | IP |
| | | | | | weeks | |
| 6 | 10 | Anti-PD-1 (J43 m2a EN) + | 10 + 10 | 10 | b.i.w. for 3 | IP |
| | | Anti-CTLA4 9D9 mIgG2b | | | weeks | |
| 7 | 10 | J43 MP8-2 2012 m2a EN + | 10 + 10 | 10 | b.i.w. for 3 | IP |
| | | Anti-CTLA4 9D9 mIgG2b | | | weeks | |
| 8 | 10 | J43 MP8-2 2011 m2a EN + | 10 + 10 | 10 | b.i.w. for 3 | IP |
| | | Anti-CTLA4 9D9 mIgG2b | | | weeks | |

[0933] FIG. 36, which plots tumor volume versus number of days post initial dose, demonstrates that anti-PD1 activatable antibodies MP8-2 2012 m2a EN and MP8-2 2011 m2a EN inhibit the growth of MC38 syngeneic tumors similar to positive control anti-PD1 antibody J43 m2a EN both as single agents and in combination with anti-CTLA4 antibody 9D9 mIgG2b (BioXCell, West Lebanon, N.H.).

### Example 33

### Activatable Anti-Mouse PD1 J43 m2a EN Antibodies Show Durable Anti-Tumor Activity when Coadministered with Anti-CTLA4 Antibody in the MC38 Syngeneic Tumor Model

[0934] This Example demonstrates anti-PD-1 activatable antibodies of the embodiments in combination with anti-CTLA4 antibodies induce durable anti-tumor complete responses in the MC38 syngeneic tumor model.

[0935] In this Example, all animals treated with combinations of anti-CTLA4 and anti-PD1 agents from Example 28 that showed sustained tumor regression ((i) anti-PD-1 J43 m2aEN+anti-CTLA4 9D9 mIgG2b (referred to in FIG. 37 as “anti-PD-1 J43 m2aEN Antibody”+“anti-CTLA4 9D9 mIgG2b Antibody”) (n=8), (ii) activatable antibody anti-PD-1 J43 MP8-2 2012 m2a EN+anti-CTLA4 9D9 mIgG2b (referred to in FIG. 37 as “J43 MP8-2 2012 m2a EN AA”+“anti-CTLA4 9D9 mIgG2b Antibody” where AA stands for activatable antibody) (n=8), and activatable antibody anti-PD-1 J43 MP8-2 2011 m2a EN+anti-CTLA4 9D9 mIgG2b (referred to in FIG. 37 as “J43 MP8-2 2011 m2a EN AA”+“anti-CTLA4 9D9 mIgG2b Antibody” where AA stands for activatable antibody) (n=6)) were implanted at day 38 with 1.5×10⁶ MC38 tumor cells in the left flank opposite to the original MC38 implantation. Five untreated mice were implanted with 1.5×10⁶ MC38 tumor cells to confirm tumorigenic activity of the MC38 cells.

[0936] FIG. 37 shows that no mice previously treated with combinations of anti-PD1 and anti-CTLA4 agents showed regrowth of the original tumor sites (right flank) or growth of new tumors (left flank) while all five of the untreated control mice showed rapid tumor growth.

### Example 34

### Activatable Anti-Mouse PD-1 J43 Antibodies Reduce Incidence of Diabetes in NOD Mice Co-Dosed with Anti-CTLA4 Antibody

[0937] This Example demonstrates that anti-PD-1 activatable antibodies of the embodiments in combination with anti-CTLA4 antibodies protected NOD mice from PD1 m2a EN-mediated induction of diabetes.

[0938] In this Example, anti-PD-1 J43 activatable antibody I\/1P8-2 2011 m2aEN was analyzed for the ability to protect from anti-PD-1 induction of diabetes in NOD mice when dosed concurrently with anti-CTLA-4 9D9 mIgG2b antibody (BioXcell cat #BE0164). The NOD mice, substrain NOD/ShiLtJ, were obtained from Jackson Laboratory at 4 weeks and acclimated on site for 1 week. At 5 weeks, mice were checked for diabetes prior to enrollment, grouped, and dosed as set forth in Table 25.

TABLE 25
Dosing regimen

| | | Treatment | | | | Dose | | |
|---|---|---|---|---|---|---|---|---|
| | | | Dose | | Dose | volume | | |
| Group | Count | Article #1 | (mg/kg) | Article #2 | (mg/kg) | (mL/kg) | Schedule | Route |
| 1 | 8 | Anti-CTLA4 | 10 | mIgG1 | 10 | 10 | d0, d4, d7 | IP |
| | | 9D9 mIgG2b | | MOPC-21 | | | | |
| 2 | 8 | Anti-PD-1 (J43 | 10 | mIgG2b | 10 | 10 | d0, d4, d7 | IP |
| | | m2a EN) | | MPC-11 | | | | |
| 3 | 8 | Anti-PD-1 (J43 | 10 | Anti-CTLA4 | 10 | 10 | d0, d4, d7 | IP |
| | | m2a EN) | | 9D9 mIgG2b | | | | |
| 4 | 8 | J43 MP8-2 | 10 | mIgG2b | 10 | 10 | d0, d4, d7 | IP |
| | | 2011 m2a EN | | MPC-11 | | | | |
| 5 | 8 | J43 MP8-2 | 10 | Anti-CTLA4 | 10 | 10 | d0, d4, d7 | IP |
| | | 2011 m2a EN | | 9D9 mIgG2b | | | | |

[0939] FIG. 38, which plots % non-diabetic versus number of days post initial dose, shows that the single agent anti-PD-1 J43 antibody (referred to in the figure as “anti-PD1 J43 Ab”) and the combination of 10 mg/kg anti-PD-1 J43 antibody plus 10 mg/kg anti-CTLA4 antibody (referred to in the figure as “anti-PD1 J43 Ab”+“anti-CTLA4 9D9 mIgG2b”) dosed on days 0, 4 and 7 induced diabetes in 25% of NOD mice by day nine. In contrast, the same dosing schedule of activatable antibody anti-PD-1 J43 MP8-2 2011 m2a EN (referred to in the figure as “J43 MP8-2 2011 m2a EN AA” where AA stands for activatable antibody) as a single agent or in combination with anti-CTLA4 antibody (referred to in the figure as “J43 MP8-2 2011 m2a EN AA+“anti-CTLA4 9D9 mIgG2b” where AA stands for activatable antibody) resulted in no induction of diabetes to day fifteen.

### Example 35

### Anti-PD-1 Nivolumab Activatable Antibodies of the Embodiments are Functionally Masked in a Human T-Cell Restimulation Assay

[0940] This Example describes the effect of masking moieties on the biological function of the anti-PD-1 nivolumab antibody.

[0941] PBMCs from a CMV-positive donor (Hemacare) were plated at 2×10⁵ cells/well in the presence of CMV viral lysate (Astarte) and either anti-PD-1 antibody A1.5, anti-PD-1 activatable antibody A1.5 PD34 2001, anti-PD-1 antibody nivolumab (NV1), anti-PD-1 nivolumab activatable antibody NV1 NV07 2001, or an hIgG4 isotype control antibody. After four days, supernatant was removed from each well and IFN-gamma levels were assayed using an IFN-gamma ELISA kit (Life Technologies, Carlsbad, Calif.).

[0942] FIG. 39 demonstrates that the anti-PD-1 activatable antibody A1.5 PD34 2001 (referred to in the figure as “A1.5 PD34 2001 AA” where AA stands for activatable antibody) and anti-PD1 nivolumab activatable antibody NV1 NV07 2001 (referred to in the figure as “NV1 NV07 2001 AA” where AA stands for activatable antibody) effected increased CMV-stimulated IFN-gamma secretion compared to the control hIgG4 antibody (referred to in the figure as hIgG4) but decreased potency relative to anti-PD-1 parental antibody A1.5 (referred to in the figure as A1.5) or anti-PD-1 parental antibody nivolumab (referred to in the figure as NV1).

### Example 36

### Anti-PD-1 Pembrolizumab Activatable Antibodies of the Embodiments are Functionally Masked in a Human T-Cell Restimulation Assay

[0943] This example describes the effect of masking moieties on the biological function of the anti-PD-1 pembrolizumab antibody.

[0944] PBMCs from a CMV-positive donor (Hemacare) were plated at 2×10⁵ cells/well in the presence of 4 ug/ml CMV viral lysate (Astarte) and either anti-PD-1 antibody A1.5, anti-PD-1 antibody pembrolizumab (PM1), anti-PD-1 pembrolizumab activatable antibody PM1 PM07 2001, or an hIgG4 isotype control antibody. After four days, supernatant was removed from each well and IFN-gamma levels were assayed using an IFN-gamma ELISA kit (Life Technologies, Carlsbad, Calif.).

[0945] FIG. 40 demonstrates that anti-PD1 pembrolizumab activatable antibody PM1 PM07 2001 (referred to in the figure as “PM1 PM07 2001 AA” where AA stands for activatable antibody) effected increased CMV-stimulated IFN-gamma secretion compared to the control hIgG4 antibody (referred to in the figure as hIgG4) but decreased potency relative to anti-PD-1 parental antibody A1.5 (referred to in the figure as A1.5) or anti-PD-1 parental antibody pembrolizumab (referred to in the figure as PM1).

### Other Embodiments

[0946] While the invention has been described in conjunction with the detailed description thereof, the foregoing description is intended to illustrate and not limit the scope of the invention, which is defined by the scope of the appended claims. Other aspects, advantages, and modifications are within the scope of the following.

The application's sequence listing, which the Patent Office published only in electronic form, follows.

SEQUENCE LISTING (2059 sequences)

SEQ ID NO: 1 - protein, 119 aa, Artificial Sequence
  chemically synthesized
EVKLVESGGGLVKPGGSLKLSCAASGFTFSGYAMSWVRQTPAKRLEWVAYISNSGGNAHYPDSVKGRFTISRDNAKNTLYLQMSSLRSEDTAMYYCTREDYGTSPFVYWGQGTLVTVSA

SEQ ID NO: 2 - DNA, 357 bp, Artificial Sequence
  chemically synthesized
gaagtgaagctggtggagtctgggggaggcttagtgaaacctggagggtccctgaaactctcctgtgcagcctctggattcactttcagtggctatgccatgtcttgggttcgccagactccggcgaagaggctggagtgggtcgcatacattagtaatagtggtggtaacgcccactatccagacagtgtaaagggccgattcaccatctccagagacaatgccaagaacaccctatacctgcaaatgagcagtctgaggtctgaggacacggccatgtattactgtacaagagaggactacggtactagtccttttgtttactggggccaagggactctggtcactgtctctgca

SEQ ID NO: 3 - protein, 111 aa, Artificial Sequence
  chemically synthesized
DIVLTQSPASLAVSLGQRTTISCRASESVDNYGISFMNWFQQKPGQPPKLLIYAASNQGSGVPARFSGSGSGTDFSLNIHPMEEDDTAVYFCQQSKDVPWTFGGGTKLEIR

SEQ ID NO: 4 - DNA, 334 bp, Artificial Sequence
  chemically synthesized
gacattgtgctgacccaatctccagcttctttggctgtgtctcttgggcagaggaccaccatctcctgcagagccagcgaaagtgttgataattatggcattagttttatgaactggttccaacagaaaccaggacagccacccaaactcctcatctatgctgcatccaaccaaggatccggggtccctgccaggtttagtggcagtgggtctgggacagacttcagcctcaacatccatcctatggaggaggatgatactgcagtgtatttctgtcagcaaagtaaggacgttccgtggacgttcggtggaggcaccaagctggaaatcagac

SEQ ID NO: 5 - protein, 116 aa, Artificial Sequence
  chemically synthesized
EVQLQQSGPELVKPGDSVKMSCKASGYTFTDYYMDWVKQSHGKSLEWIGYIYPKNGGSSYNQKFKGKATLTVDKSSSTAYMELHSLTSEDSAVYYCARKVVATDYWGQGTTLTVSS

SEQ ID NO: 6 - DNA, 348 bp, Artificial Sequence
  chemically synthesized
gaggtccagctgcaacagtctggacctgagctggtgaagcctggggattcagtgaagatgtcctgcaaggcttctggctacacattcactgactactacatggactgggtgaagcagagccatggaaagagccttgagtggattggatatatttatcctaaaaatggtggttccagctacaatcagaagttcaagggcaaggccacattgactgtagacaagtcctccagcacagcctacatggagctccacagcctgacatctgaggactctgcagtctattactgtgcaagaaaggtcgtagctacggactactggggccaaggcaccactctcacagtctcctca

SEQ ID NO: 7 - protein, 113 aa, Artificial Sequence
  chemically synthesized
DIVMSQSPSSLAVSVGEKVTMSCKSSQSLLYSSNQKNYLAWYQQKPGQSPKLLIFWASIRESGVPDRFTGSGSGTDFTLTISSVKAEDRAVYYCQQCDSYPWTFGGGTKLEIK

SEQ ID NO: 8 - DNA, 340 bp, Artificial Sequence
  chemically synthesized
gacattgtgatgtcacagtctccatcctccctagctgtgtcagttggagagaaggttactatgagctgcaagtccagtcagagccttttatatagtagcaatcaaaagaactacttggcctggtaccagcagaaaccagggcagtctcctaaactgctgattttctgggcatctattagggaatctggggtccctgatcgcttcacaggcagtggatctgggacagatttcactctcaccatcagcagtgtgaaggctgaagaccgggcagtttattactgtcagcaatgtgatagctatccgtggacgttcggtggaggcaccaaactggaaatcaaac

SEQ ID NO: 9 - protein, 119 aa, Artificial Sequence
  chemically synthesized
EVKLVESGGGLVKPGGSLKLSCAASGFTFSNYAMSWVRQTPAKRLEWVAYISNGGGDTHYPDSLKGRFTVSRDNAKNTLYLQMSSLKSEDTAMYYCARENYGTSPFVYWGQGTLVTVSA

SEQ ID NO: 10 - DNA, 357 bp, Artificial Sequence
  chemically synthesized
gaagtgaagctggtggagtctgggggaggcttagtgaaacctggagggtccctgaaactctcctgtgcagcctctggattcactttcagtaactatgccatgtcttgggttcgccagactccggcgaagaggctggagtgggtcgcatacattagtaatggtggtggtgacacccactatccagacagtttaaagggccgattcaccgtctccagagacaatgccaagaacaccctgtacctacaaatgagcagtctgaagtctgaggacacggccatgtattactgtgcaagagaaaactacggtactagtccctttgtttactggggccaagggactctggtcactgtctctgca

SEQ ID NO: 11 - protein, 111 aa, Artificial Sequence
  chemically synthesized
DIVLTQSPASLAVSLGQRATISCRASESVDNYGISFMNWFQQKPGQPPKLLIYAASNQGSGVPARFSGSGSGTDFSLNIHPMEEDDTAMYFCQQSKDVPWTFGGGTKLEIK

SEQ ID NO: 12 - DNA, 334 bp, Artificial Sequence
  chemically synthesized
gacattgtgctgacccaatctccagcttctttggctgtgtctctagggcagagggccaccatctcctgcagagccagcgaaagtgttgataattatggcattagttttatgaactggttccaacagaaaccaggacagccacccaaactcctcatctatgctgcatccaaccaaggatccggggtccctgccaggtttagtggcagtgggtctgggacagacttcagcctcaacatccatcctatggaggaggatgatactgcaatgtatttctgtcagcaaagtaaagatgttccgtggacgttcggtggaggcaccaagctggaaatcaaac

SEQ ID NO: 13 - protein, 116 aa, Artificial Sequence
  chemically synthesized
EVQLVESGGGLVKSGGSLKLSCAHSGFSFSSYDMSWVRQTPAKRLEWVATISGGGRYTYYPDSVKGRFTISRDNAKNTLYLQMSGLRSEDTAMYYCASNYYGFDYWGQGTTLTVSS

SEQ ID NO: 14 - DNA, 348 bp, Artificial Sequence
  chemically synthesized
gaagtgcagctggtggagtctgggggaggcttagtgaagtctggagggtccctgaaactctcctgtgcgcattctggattcagttttagtagttatgacatgtcttgggttcgccagactccggcgaagaggctggagtgggtcgcaaccattagtggtggtggtcgttacacctactatccagacagtgtgaagggccgattcaccatctccagagacaatgccaagaacaccctgtacctgcaaatgagcggtctgaggtctgaggacacagccatgtattactgtgcaagtaattactacggttttgactactggggccaaggcaccactctcacagtctcttca

SEQ ID NO: 15 - protein, 107 aa, Artificial Sequence
  chemically synthesized
DIVMTQSHKFMSTSVGDRVSITCKASQDVGTAVAWYQQKPGQSPKLLIYWASTRHTGVPDRFTGSGSGTDFTLTISNVQSEDLADYFCQQYSSYPWTFGGGTKLEIK

SEQ ID NO: 16 - DNA, 322 bp, Artificial Sequence
  chemically synthesized
gatattgtgatgacccagtctcacaaattcatgtccacatcagtaggagacagggtcagcatcacctgcaaggccagtcaggatgtgggtactgctgtagcctggtatcaacagaaaccagggcaatctcctaaactactgatttactgggcatccacccggcacactggagtccctgatcgcttcacgggcagtggatctgggacagatttcactctcaccattagcaatgtgcagtctgaagacttggcagattatttctgtcagcaatatagcagctatccgtggacgttcggtggaggcaccaagctggaaatcaaac

SEQ ID NO: 17 - protein, 116 aa, Artificial Sequence
  chemically synthesized
KVMLVESGGDLVKPGGSLKLSCAASGFTFSSYGMSWVRQTPEKRLEWVATISGGGRDIYYADTVKGRFTISRDNAKNTLYLQMSSLRSEDTALYFCARLYLGFDYWGQGTTLTVSS

SEQ ID NO: 18 - DNA, 348 bp, Artificial Sequence
  chemically synthesized
aaagtgatgctggtggagtctgggggagacttagtgaagcctggagggtccctgaaactctcctgtgcagcctctggattcactttcagtagctatggcatgtcttgggttcgccagactccggagaagaggctggagtgggtcgcaaccattagtggtggtggtagagacatctactacgcagacactgtgaagggccgattcaccatctccagagacaatgccaagaacaccctgtacctacaaatgagcagtctgaggtctgaggacacggccttgtatttctgtgcaaggctctacctggggtttgactactggggccaaggcaccactctcacagtctcctca

SEQ ID NO: 19 - protein, 107 aa, Artificial Sequence
  chemically synthesized
DIQMTQSPASQSASLGESVTITCLASQTIGTWLAWYQQKPGKSPQLLIYAATSLADGVPSRFSGSGSGTKFSFKISSLQAEDFVSYYCQQLYSIPWTFGGGTKLEIK

SEQ ID NO: 20 - DNA, 322 bp, Artificial Sequence
  chemically synthesized
gacattcagatgacccagtctcctgcctcccagtctgcatctctgggagaaagtgtcaccatcacatgcctggcaagtcagaccattggtacatggttagcatggtatcagcagaaaccagggaaatctcctcagctcctgatttatgctgcaaccagcttggcagatggggtcccatcaaggttcagtggtagtggatctggcacaaaattttctttcaagatcagcagcctacaggctgaagattttgtaagttattactgtcaacaactttacagtattccgtggacattcggtggaggcaccaagctggaaatcaaac

SEQ ID NO: 21 - protein, 119 aa, Artificial Sequence
  chemically synthesized
EVQLVESGGGLVQPGGSLRLSCAASGFTFSGYAMSWVRQAPGKGLEWVAYISNSGGNAHYADSVKGRFTISRDNSKNTLYLQMNSLRAEDTAVYYCTREDYGTSPFVYWGQGTLVTVSS

SEQ ID NO: 22 - DNA, 357 bp, Artificial Sequence
  chemically synthesized
gaagtgcagctggtggaatctggcggcggactggtgcagcctggcggatctctgagactgagctgtgccgccagcggcttcacctttagcggctacgccatgagctgggtgcgccaggctcctggcaaaggcctggaatgggtggcctacatcagcaacagcggcggcaatgcccactacgccgatagcgtgaagggccggttcaccatcagccgggacaacagcaagaacaccctgtacctgcagatgaacagcctgcgggccgaggacaccgccgtgtactactgcaccagagaggactacggcaccagccccttcgtgtattggggccagggtaccctcgtgaccgtctcctca

SEQ ID NO: 23 - protein, 119 aa, Artificial Sequence
  chemically synthesized
EVQLVESGGGLVQPGGSLRLSCAASGFTFSGYAMSWVRQAPGKGLEWVSYISNSGGNAHYADSVKGRFTISRDNSKNTLYLQMNSLRAEDTAVYYCAKEDYGTSPFVYWGQGTLVTVSS

SEQ ID NO: 24 - DNA, 357 bp, Artificial Sequence
  chemically synthesized
gaagtgcagctggtggaatctggcggcggactggtgcagcctggcggatctctgagactgagctgtgccgccagcggcttcacctttagcggctacgccatgagctgggtgcgccaggctcctggcaaaggcctggaatgggtgagttacatcagcaacagcggcggcaatgcccactacgccgatagcgtgaagggccggttcaccatcagccgggacaacagcaagaacaccctgtacctgcagatgaacagcctgcgggccgaggacaccgccgtgtactactgcgccaaggaggactacggcaccagccccttcgtgtattggggccagggtaccctcgtgaccgtctcctca

SEQ ID NO: 25 - protein, 119 aa, Artificial Sequence
  chemically synthesized
EVQLVESGGGLVQPGGSLRLSCAASGFTFSGYAMSWVRQAPGKGLEWVAYISNSGGNTHYADSVKGRFTISRDNSKNTLYLQMNSLRAEDTAVYYCAREDYGTSPFVYWGQGTLVTVSS

SEQ ID NO: 26 - DNA, 357 bp, Artificial Sequence
  chemically synthesized
gaagtgcagctggtggaatctggcggcggactggtgcagcctggcggatctctgagactgagctgtgccgccagcggcttcacctttagcggctacgccatgagctgggtgcgccaggctcctggcaaaggcctggaatgggtggcctacatcagcaacagcggcggcaatacccactacgccgatagcgtgaagggccggttcaccatcagccgggacaacagcaagaacaccctgtacctgcagatgaacagcctgcgggccgaggacaccgccgtgtactactgcgccagagaggactacggcaccagccccttcgtgtattggggccagggtaccctcgtgaccgtctcctca

SEQ ID NO: 27 - protein, 119 aa, Artificial Sequence
  chemically synthesized
EVQLVESGGGLVQPGGSLRLSCAASGFTFSGYAMSWVRQAPGKGLEWVAYISNSGGNTHYADSLKGRFTVSRDNSKNTLYLQMNSLRAEDTAVYYCAREDYGTSPFVYWGQGTLVTVSS

SEQ ID NO: 28 - DNA, 357 bp, Artificial Sequence
  chemically synthesized
gaagtgcagctggtggaatctggcggcggactggtgcagcctggcggatctctgagactgagctgtgccgccagcggcttcacctttagcggctacgccatgagctgggtgcgccaggctcctggcaaaggcctggaatgggtggcctacatcagcaacagcggcggcaatacccactacgccgatagcctgaagggccggttcaccgtcagccgggacaacagcaagaacaccctgtacctgcagatgaacagcctgcgggccgaggacaccgccgtgtactactgcgccagagaggactacggcaccagccccttcgtgtattggggccagggtaccctcgtgaccgtctcctca

SEQ ID NO: 29 - protein, 116 aa, Artificial Sequence
  chemically synthesized
QVQLVQSGAEVKKPGASVKMSCKASGYTFTDYYMDWVRQAPGQGLEWIGYIYPKNGGSSYAQKFQGRATLTVDTSTSTAYMELSSLRSEDTAVYYCARKVVATDYWGQGTLLTVSS

SEQ ID NO: 30 - DNA, 348 bp, Artificial Sequence
  chemically synthesized
caggtgcagctggtgcagtctggcgccgaagtgaagaaaccaggcgccagcgtgaagatgagctgcaaggccagcggctacaccttcaccgactactacatggactgggtgcgccaggcccctggacagggactggaatggatcggctacatctaccccaagaacggcggcagcagctacgcccagaagttccagggcagagccaccctgaccgtggacaccagcacaagcaccgcctacatggaactgagcagcctgcggagcgaggacaccgccgtgtactactgcgccagaaaggtggtggccacagactactggggccagggtaccctgctgaccgtgtctagt

SEQ ID NO: 31 - protein, 116 aa, Artificial Sequence
  chemically synthesized
QVQLVQSGAEVKKPGASVKMSCKASGYTFTDYYMDWVRQAPGQGLEWIGYIYPKNGGSSYAQKFQGRATLTVDKSTSTAYMELSSLRSEDTAVYYCARKVVATDYWGQGTLLTVSS

SEQ ID NO: 32 - DNA, 348 bp, Artificial Sequence
  chemically synthesized
caggtgcagctggtgcagtctggcgccgaagtgaagaaaccaggcgccagcgtgaagatgagctgcaaggccagcggctacaccttcaccgactactacatggactgggtgcgccaggcccctggacagggactggaatggatcggctacatctaccccaagaacggcggcagcagctacgcccagaagttccagggcagagccaccctgaccgtggacaagagcaccagcaccgcctacatggaactgagcagcctgcggagcgaggacaccgccgtgtactactgcgccagaaaggtggtggccacagactactggggccagggtaccctgctgaccgtgtctagt

SEQ ID NO: 33 - protein, 119 aa, Artificial Sequence
  chemically synthesized
EVQLVESGGGLVQPGGSLRLSCAASGFTFSNYAMSWVRQAPGKGLEWVAYISNGGGDTHYADSLKGRFTVSRDNSKNTLYLQMNSLRAEDTAVYYCARENYGTSPFVYWGQGTLVTVSS

SEQ ID NO: 34 - DNA, 357 bp, Artificial Sequence
  chemically synthesized
gaagtgcagctggtggaatctggcggcggactggtgcagcctggcggatctctgagactgagctgtgccgccagcggcttcaccttcagcaactacgccatgagctgggtgcgccaggcccctggaaaaggcctggaatgggtggcctacatcagcaacggcggaggcgatacccactacgccgatagcctgaagggccggttcaccgtgtccagagacaacagcaagaacaccctgtacctgcagatgaacagcctgcgggccgaggacaccgccgtgtactattgcgccagagagaactacggcaccagccccttcgtgtactggggccagggtaccctcgtgaccgtgtcctct

SEQ ID NO: 35 - protein, 119 aa, Artificial Sequence
  chemically synthesized
EVQLVESGGGLVQPGGSLRLSCAASGFTFSNYAMSWVRQAPGKGLEWVAYISNQGGDTHYADSLKGRFTVSRDNSKNTLYLQMNSLRAEDTAVYYCARENYGTSPFVYWGQGTLVTVSS

SEQ ID NO: 36 - DNA, 357 bp, Artificial Sequence
  chemically synthesized
gaagtgcagctggtggaatctggcggcggactggtgcagcctggcggatctctgagactgagctgtgccgccagcggcttcaccttcagcaactacgccatgagctgggtgcgccaggcccctggaaaaggcctggaatgggtggcctacatcagccaaggcggaggcgatacccactacgccgatagcctgaagggccggttcaccgtgtccagagacaacagcaagaacaccctgtacctgcagatgaacagcctgcgggccgaggacaccgccgtgtactattgcgccagagagaactacggcaccagccccttcgtgtactggggccagggtaccctcgtgaccgtgtcctct

SEQ ID NO: 37 - protein, 116 aa, Artificial Sequence
  chemically synthesized
EVQLVESGGGLVQPGGSLRLSCAHSGFSFSSYDMSWVRQAPGKGLEWVATISGGGRYTYYADSVKGRFTISRDNSKNTLYLQMNSLRAEDTAVYYCASNYYGFDYWGQGTLLTVSS

SEQ ID NO: 38 - DNA, 348 bp, Artificial Sequence
  chemically synthesized
gaagtgcagctggtggaatctggcggcggactggtgcagcctggcggatctctgagactgagctgtgcccacagcggcttcagcttcagcagctacgacatgagctgggtgcgccaggcccctggcaaaggactggaatgggtggccacaatcagcggcggaggccggtacacctactacgccgatagcgtgaagggccggttcaccatcagccgggacaacagcaagaacaccctgtacctgcagatgaacagcctgcgggccgaggacaccgccgtgtactactgcgccagcaactactacggcttcgactactggggccagggtaccctgctgaccgtgtcatct

SEQ ID NO: 39 - protein, 111 aa, Artificial Sequence
  chemically synthesized
DIQLTQSPSSLSASVGDRVTITCRASESVDNYGISFMNWFQQKPGKAPKLLIYAASNQGSGVPSRFSGSGSGTDFTLTISSMQPEDFATYYCQQSKDVPWTFGQGTKLEIK

SEQ ID NO: 40 - DNA, 333 bp, Artificial Sequence
  chemically synthesized
gacatccagctgacccagagccctagcagcctgtctgccagcgtgggcgacagagtgaccatcacctgtagagccagcgagagcgtggacaactacggcatcagcttcatgaactggttccagcagaagcccggcaaggcccccaagctgctgatctacgccgccagcaatcagggcagcggcgtgccaagcagattttccggctctggcagcggcaccgacttcaccctgaccatcagcagcatgcagcccgaggacttcgccacctactactgccagcagagcaaggacgtgccctggacctttggccagggtaccaagctggaaatcaag

SEQ ID NO: 41 - protein, 111 aa, Artificial Sequence
  chemically synthesized
DIQLTQSPSSLSVSVGDRATITCRASESVDNYGISFMNWFQQKPGKAPKLLIYAASNQGSGVPSRFSGSGSGTDFTLTISSMQPEDFATYYCQQSKDVPWTFGQGTKLEIK

SEQ ID NO: 42 - DNA, 333 bp, Artificial Sequence
  chemically synthesized
gacatccagctgacccagagccctagcagcctgtccgtgtccgtgggcgacagagccaccatcacctgtagagccagcgagagcgtggacaactacggcatcagcttcatgaactggttccagcagaagcccggcaaggcccccaagctgctgatctacgccgccagcaatcagggcagcggcgtgccaagcagattttccggctctggcagcggcaccgacttcaccctgaccatcagcagcatgcagcccgaggacttcgccacctactactgccagcagagcaaggacgtgccctggacctttggccagggtaccaagctggaaatcaag

SEQ ID NO: 43 - protein, 111 aa, Artificial Sequence
  chemically synthesized
DIQLTQSPSSLSASVGDRVTITCRASESVDQYGISFMNWFQQKPGKAPKLLIYAASNQGSGVPSRFSGSGSGTDFTLTISSMQPEDFATYYCQQSKDVPWTFGQGTKLEIK

SEQ ID NO: 44 - DNA, 333 bp, Artificial Sequence
  chemically synthesized
gacatccagctgacccagagccctagcagcctgtctgccagcgtgggcgacagagtgaccatcacctgtagagccagcgagagcgtggaccaatacggcatcagcttcatgaactggttccagcagaagcccggcaaggcccccaagctgctgatctacgccgccagcaatcagggcagcggcgtgccaagcagattttccggctctggcagcggcaccgacttcaccctgaccatcagcagcatgcagcccgaggacttcgccacctactactgccagcagagcaaggacgtgccctggacctttggccagggtaccaagctggaaatcaag

SEQ ID NO: 45 - protein, 111 aa, Artificial Sequence
  chemically synthesized
DIQLTQSPSSLSASVGDRVTITCRASESVDSYGISFMNWFQQKPGKAPKLLIYAASNQGSGVPSRFSGSGSGTDFTLTISSMQPEDFATYYCQQSKDVPWTFGQGTKLEIK

SEQ ID NO: 46 - DNA, 333 bp, Artificial Sequence
  chemically synthesized
gacatccagctgacccagagccctagcagcctgtctgccagcgtgggcgacagagtgaccatcacctgtagagccagcgagagcgtggacagttacggcatcagcttcatgaactggttccagcagaagcccggcaaggcccccaagctgctgatctacgccgccagcaatcagggcagcggcgtgccaagcagattttccggctctggcagcggcaccgacttcaccctgaccatcagcagcatgcagcccgaggacttcgccacctactactgccagcagagcaaggacgtgccctggacctttggccagggtaccaagctggaaatcaag

SEQ ID NO: 47 - protein, 111 aa, Artificial Sequence
  chemically synthesized
DIQLTQSPSSLSASVGDRVTITCRASESVDAYGISFMNWFQQKPGKAPKLLIYAASNQGSGVPSRFSGSGSGTDFTLTISSMQPEDFATYYCQQSKDVPWTFGQGTKLEIK

SEQ ID NO: 48 - DNA, 333 bp, Artificial Sequence
  chemically synthesized
gacatccagctgacccagagccctagcagcctgtctgccagcgtgggcgacagagtgaccatcacctgtagagccagcgagagcgtggacgcttacggcatcagcttcatgaactggttccagcagaagcccggcaaggcccccaagctgctgatctacgccgccagcaatcagggcagcggcgtgccaagcagattttccggctctggcagcggcaccgacttcaccctgaccatcagcagcatgcagcccgaggacttcgccacctactactgccagcagagcaaggacgtgccctggacctttggccagggtaccaagctggaaatcaag

SEQ ID NO: 49 - protein, 111 aa, Artificial Sequence
  chemically synthesized
DIQLTQSPSSLSASVGDRVTITCRASESVDNYGISFMNWFQQKPGKAPKLLIYAASDQGSGVPSRFSGSGSGTDFTLTISSMQPEDFATYYCQQSKDVPWTFGQGTKLEIK

SEQ ID NO: 50 - DNA, 333 bp, Artificial Sequence
  chemically synthesized
gacatccagctgacccagagccctagcagcctgtctgccagcgtgggcgacagagtgaccatcacctgtagagccagcgagagcgtggacaactacggcatcagcttcatgaactggttccagcagaagcccggcaaggcccccaagctgctgatctacgccgccagcgatcagggcagcggcgtgccaagcagattttccggctctggcagcggcaccgacttcaccctgaccatcagcagcatgcagcccgaggacttcgccacctactactgccagcagagcaaggacgtgccctggacctttggccagggtaccaagctggaaatcaag

SEQ ID NO: 51 - protein, 111 aa, Artificial Sequence
  chemically synthesized
DIQLTQSPSSLSVSVGDRATITCRASESVDAYGISFMNWFQQKPGKAPKLLIYAASNQGSGVPSRFSGSGSGTDFTLTISSMQPEDFATYYCQQSKDVPWTFGQGTKLEIK

SEQ ID NO: 52 - DNA, 333 bp, Artificial Sequence
  chemically synthesized
gacatccagctgacccagagccctagcagcctgtccgtgtccgtgggcgacagagccaccatcacctgtagagccagcgagagcgtggacgcttacggcatcagcttcatgaactggttccagcagaagcccggcaaggcccccaagctgctgatctacgccgccagcaatcagggcagcggcgtgccaagcagattttccggctctggcagcggcaccgacttcaccctgaccatcagcagcatgcagcccgaggacttcgccacctactactgccagcagagcaaggacgtgccctggacctttggccagggtaccaagctggaaatcaag

SEQ ID NO: 53 - protein, 111 aa, Artificial Sequence
  chemically synthesized
DIQLTQSPSSLSASVGDRVTITCRASESVDAYGISFMNWFQQKPGKAPKLLIYAASNQGSGVPSRFSGSGSGTDFTLTISSMQPEDFATYYCQQSKDVPWTFGQGTKVEIK

SEQ ID NO: 54 - DNA, 333 bp, Artificial Sequence
  chemically synthesized
gacatccagctgacccagagccctagcagcctgtctgccagcgtgggcgacagagtgaccatcacctgtagagccagcgagagcgtggacgcttacggcatcagcttcatgaactggttccagcagaagcccggcaaggcccccaagctgctgatctacgccgccagcaatcagggcagcggcgtgccaagcagattttccggctctggcagcggcaccgacttcaccctgaccatcagcagcatgcagcccgaggacttcgccacctactactgccagcagagcaaggacgtgccctggacctttggccagggtaccaaggtggaaatcaag

SEQ ID NO: 55 - protein, 111 aa, Artificial Sequence
  chemically synthesized
DIQLTQSPSSLSASVGDRVTITCRASESVDAYGISFMNWFQQKPGKAPKLLIYAASNQGSGVPSRFSGSGSGTDFTLTISSMQPEDFATYYCQQSKDVPYTFGQGTKLEIK

SEQ ID NO: 56 - DNA, 333 bp, Artificial Sequence
  chemically synthesized
gacatccagctgacccagagccctagcagcctgtctgccagcgtgggcgacagagtgaccatcacctgtagagccagcgagagcgtggacgcttacggcatcagcttcatgaactggttccagcagaagcccggcaaggcccccaagctgctgatctacgccgccagcaatcagggcagcggcgtgccaagcagattttccggctctggcagcggcaccgacttcaccctgaccatcagcagcatgcagcccgaggacttcgccacctactactgccagcagagcaaggacgtgccctacacctttggccagggtaccaagctggaaatcaag

SEQ ID NO: 57 - protein, 113 aa, Artificial Sequence
  chemically synthesized
DIQMTQSPSSLSASVGDRVTMTCKSSQSLLYSSNQKNYLAWYQQKPGKAPKLLIFWASIRESGVPSRFSGSGSGTDFTLTISSVQPEDFATYYCQQSDSYPWTFGQGTKLEIK

SEQ ID NO: 58 - DNA, 339 bp, Artificial Sequence
  chemically synthesized
gacatccagatgacccagagccccagcagcctgtctgccagcgtgggcgatagagtgaccatgacctgcaagagcagccagagcctgctgtactccagcaaccagaagaactacctggcctggtatcagcagaagcccggcaaggcccccaagctgctgatcttctgggccagcatccgggaaagcggcgtgcccagcagattttctggctctggcagcggcaccgacttcaccctgacaatcagcagcgtgcagcccgaggacttcgccacctactactgccagcagagcgacagctacccctggacctttggccagggtaccaagctggaaatcaag

SEQ ID NO: 59 - protein, 107 aa, Artificial Sequence
  chemically synthesized
DIQMTQSPSSLSASVGDRVTITCKASQDVGTAVAWYQQKPGKAPKLLIYWASTRHTGVPSRFSGSGSGTDFTLTISSVQPEDFATYYCQQYSSYPWTFGQGTKLEIK

SEQ ID NO: 60 - DNA, 321 bp, Artificial Sequence
  chemically synthesized
gacatccagatgacccagagccccagcagcctgtctgccagcgtgggcgacagagtgaccatcacatgcaaggccagccaggacgtgggaacagccgtggcctggtatcagcagaagcctggcaaggcccccaagctgctgatctactgggccagcaccagacacaccggcgtgcccagcagattttctggcagcggctccggcaccgacttcaccctgacaatcagcagcgtgcagcccgaggacttcgccacctactactgccagcagtacagcagctacccctggacctttggccagggtaccaagctggaaatcaag

SEQ ID NO: 61 - protein, 107 aa, Artificial Sequence [sequence omitted]

SEQ ID NO: 62 - DNA, 321 bp, Artificial Sequence
  chemically synthesized
cgtacggtggctgcaccatctgtcttcatcttcccgccatctgatgagcagttgaaatctggaactgcctctgttgtgtgcctgctgaataacttctatcccagagaggccaaagtacagtggaaggtggataacgccctccaatcgggtaactcccaggagagtgtcacagagcaggacagcaaggacagcacctacagcctcagcagcaccctgacgctgagcaaagcagactacgagaaacacaaagtctacgcctgcgaagtcacccatcagggcctgagctcgcccgtcacaaagagcttcaacaggggagagtgt

SEQ ID NO: 63 - protein, 327 aa, Artificial Sequence
  chemically synthesized
ASTKGPSVFPLAPCSRSTSESTAALGCLVKDYFPEPVTVSWNSGALTSGVHTFPAVLQSSGLYSLSSVVTVPSSSLGTKTYTCNVDHKPSNTKVDKRVESKYGPPCPPCPAPEFLGGPSVFLFPPKPKDTLMISRTPEVTCVVVDVSQEDPEVQFNWYVDGVEVHNAKTKPREEQFNSTYRVVSVLTVLHQDWLNGKEYKCKVSNKGLPSSIEKTISKAKGQPREPQVYTLPPSQEEMTKNQVSLTCLVKGFYPSDIAVEWESNGQPENNYKTTPPVLDSDGSFFLYSRLTVDKSRWQEGNVFSCSVMHEALHNHYTQKSLSLSLGK

SEQ ID NO: 64 - DNA, 981 bp, Artificial Sequence
  chemically synthesized
gctagcaccaagggcccatcggtcttccccctggcaccctgtagcagaagcaccagcgagtctacagcggccctgggctgcctggtcaaggactacttccccgaaccggtgacggtgtcgtggaactcaggcgccctgaccagcggcgtgcacaccttcccggctgtcctacagtcctcaggactctactccctcagcagcgtggtgaccgtgccctccagcagcttgggcaccaagacctacacctgtaacgtggaccacaagcccagcaacaccaaggtggacaagcgggtggaatctaagtacggccctccctgccctccttgcccagcccctgaatttctggggggaccgtcagtcttcctcttccccccaaaacccaaggacaccctcatgatctcccggacccctgaggtcacatgcgtggtggtggacgtgagccaggaagaccctgaggtccagttcaactggtacgtggacggcgtggaggtgcataatgccaagacaaagccgcgggaggagcagttcaacagcacgtaccgtgtggtcagcgtcctcaccgtcctgcaccaggactggctgaatggcaaggagtacaagtgcaaggtctccaacaaaggcctgcccagctccatcgagaaaaccatctccaaagccaaagggcagccccgagaaccacaggtgtacaccctgcccccatcccaggaggagatgaccaagaaccaggtcagcctgacctgcctggtcaaaggcttctatcccagcgacatcgccgtggagtgggagagcaatgggcagccggagaacaactacaagaccacgcctcccgtgctggactccgacggctccttcttcctctacagcagactcaccgtggacaagagcaggtggcaggaagggaacgtcttctcatgctccgtgatgcatgaggctctgcacaaccactacacgcagaagagcctctccctgtctctgggtaaa

SEQ ID NO: 65 - protein, 8 aa, Artificial Sequence
  chemically synthesized
GGGSSGGS

SEQ ID NO: 66 - protein, 15 aa, Artificial Sequence
  chemically synthesized
AMSGCSWSAFCPYLA

SEQ ID NO: 67 - protein, 15 aa, Artificial Sequence
  chemically synthesized
DVNCAIWYSVCTTVP

SEQ ID NO: 68 - protein, 15 aa, Artificial Sequence
  chemically synthesized
LVCPLYALSSGVCMG

SEQ ID NO: 69 - protein, 15 aa, Artificial Sequence
  chemically synthesized
SVNCRIWSAVCAGYE

SEQ ID NO: 70 - protein, 15 aa, Artificial Sequence
  chemically synthesized
MLVCSLQPTAMCERV

SEQ ID NO: 71 - protein, 15 aa, Artificial Sequence
  chemically synthesized
APRCYMFASYCKSQY

SEQ ID NO: 72 - protein, 15 aa, Artificial Sequence
  chemically synthesized
VGPCELTPKPVCNTY

SEQ ID NO: 73 - protein, 15 aa, Artificial Sequence
  chemically synthesized
ETCNQYERSSGLCFA

SEQ ID NO: 74 - protein, 15 aa, Artificial Sequence
  chemically synthesized
APRTCYTYQCSSFYT

SEQ ID NO: 75 - protein, 15 aa, Artificial Sequence
  chemically synthesized
GLCSWYLSSSGLCVD

SEQ ID NO: 76 - protein, 15 aa, Artificial Sequence
  chemically synthesized
VPWCQLTPRVMCMWA

SEQ ID NO: 77 - protein, 15 aa, Artificial Sequence
  chemically synthesized
NWLDCQFYSECSVYG

SEQ ID NO: 78 - protein, 15 aa, Artificial Sequence
  chemically synthesized
SCPLYVMSSFGGCWD

SEQ ID NO: 79 - protein, 15 aa, Artificial Sequence
  chemically synthesized
MSHCWMFSSSCDGVK

SEQ ID NO: 80 - protein, 15 aa, Artificial Sequence
  chemically synthesized
VSYCTWLIEVTCLRG

SEQ ID NO: 81 - protein, 15 aa, Artificial Sequence
  chemically synthesized
VLCAAYALSSGICGG

SEQ ID NO: 82 - protein, 15 aa, Artificial Sequence
  chemically synthesized
TTCNLYQQSSMFCNA

SEQ ID NO: 83 - protein, 15 aa, Artificial Sequence
  chemically synthesized
APRCYMFASYCKSQY

SEQ ID NO: 84 - protein, 15 aa, Artificial Sequence
  chemically synthesized
PCDQNPYFYPYVCHA

SEQ ID NO: 85 - protein, 15 aa, Artificial Sequence
  chemically synthesized
SVCPMYALSSMLCGA

SEQ ID NO: 86 - protein, 15 aa, Artificial Sequence
  chemically synthesized
LSVECYVFSRCSSLP

SEQ ID NO: 87 - protein, 14 aa, Artificial Sequence
  chemically synthesized
FYCTYLVSLTCHPQ

SEQ ID NO: 88 - protein, 15 aa, Artificial Sequence
  chemically synthesized
SMAGCQWSSFCVQRD

SEQ ID NO: 89 - protein, 15 aa, Artificial Sequence
  chemically synthesized
IYSCYMFASRCTSDK

SEQ ID NO: 90 - protein, 15 aa, Artificial Sequence
  chemically synthesized
SRCSVYEVSSGLCDW

SEQ ID NO: 91 - protein, 15 aa, Artificial Sequence
  chemically synthesized
GMCSAYAYSSKLCTI

SEQ ID NO: 92 - protein, 15 aa, Artificial Sequence
  chemically synthesized
MTTNTCNLLCQQFLT

SEQ ID NO: 93 - protein, 15 aa, Artificial Sequence
  chemically synthesized
FQPCLMFASSCFTSK

SEQ ID NO: 94 - protein, 15 aa, Artificial Sequence
  chemically synthesized
WNCHPAGVGPVFCEV

SEQ ID NO: 95 - protein, 15 aa, Artificial Sequence
  chemically synthesized
ALCSMYLASSGLCNK

SEQ ID NO: 96 - protein, 15 aa, Artificial Sequence
  chemically synthesized
NYLSCQFFQNCYETY

SEQ ID NO: 97 - protein, 15 aa, Artificial Sequence
  chemically synthesized
GWCLFSDMWLGLCSA

SEQ ID NO: 98 - protein, 15 aa, Artificial Sequence
  chemically synthesized
EFCARDWLPYQCSSF

SEQ ID NO: 99 - protein, 15 aa, Artificial Sequence
  chemically synthesized
TSYCSIEHYPCNTHH

SEQ ID NO: 100 - protein, 15 aa, Artificial Sequence
  chemically synthesized
PYICSSFPLDCQAGQ

SEQ ID NO: 101 - protein, 15 aa, Artificial Sequence
  chemically synthesized
VGCEWYMSSSGMCSR

SEQ ID NO: 102 - protein, 15 aa, Artificial Sequence
  chemically synthesized
EVCGGCSMQSVSCWP

SEQ ID NO: 103 - protein, 15 aa, Artificial Sequence
  chemically synthesized
FTECQLSPKAICMSN

SEQ ID NO: 104 - protein, 15 aa, Artificial Sequence
  chemically synthesized
KYCLFSEYVEGTCLN

SEQ ID NO: 105 - protein, 15 aa, Artificial Sequence
  chemically synthesized
SGCPMYAWGWDECWR

SEQ ID NO: 106 - protein, 15 aa, Artificial Sequence
  chemically synthesized
VDCPWYASSSAICSR

SEQ ID NO: 107 - protein, 15 aa, Artificial Sequence
  chemically synthesized
DMLLCQIRGSCAAWG

SEQ ID NO: 108 - protein, 15 aa, Artificial Sequence
  chemically synthesized
ECHPYQASASLWCGY

SEQ ID NO: 109 - protein, 15 aa, Artificial Sequence
  chemically synthesized
MMMGCMWSAWCPPSR

SEQ ID NO: 110 - protein, 15 aa, Artificial Sequence
  chemically synthesized
NAYFRCSLMCNMIMF

SEQ ID NO: 111 - protein, 15 aa, Artificial Sequence
  chemically synthesized
ACCKESVHSVHDCKR

SEQ ID NO: 112 - protein, 15 aa, Artificial Sequence
  chemically synthesized
ACIGINSYMSNYCYL

SEQ ID NO: 113 - protein, 15 aa, Artificial Sequence
  chemically synthesized
ANCSFLELTNKFCTI

SEQ ID NO: 114 - protein, 15 aa, Artificial Sequence
  chemically synthesized
AYCSYLMFASNPCII

SEQ ID NO: 115 - protein, 15 aa, Artificial Sequence
  chemically synthesized
CFTSKCPCLCYSLLA

SEQ ID NO: 116 - protein, 15 aa, Artificial Sequence
  chemically synthesized
CLCRDINCWLGCSKT

SEQ ID NO: 117 - protein, 15 aa, Artificial Sequence
  chemically synthesized
CWCDIYCSPYQCSSF

SEQ ID NO: 118 - protein, 15 aa, Artificial Sequence
  chemically synthesized
DCIYYYQQSANLCSY

SEQ ID NO: 119 - protein, 15 aa, Artificial Sequence
  chemically synthesized
DCTGVNYYIDKHCTN

SEQ ID NO: 120 - protein, 15 aa, Artificial Sequence
  chemically synthesized
DECHGYLRSSGLCGG

SEQ ID NO: 121 - protein, 15 aa, Artificial Sequence
  chemically synthesized
DICSAYAASSGFCYY

SEQ ID NO: 122 - protein, 15 aa, Artificial Sequence
  chemically synthesized
DIICVLTPTAWCGRT

SEQ ID NO: 123 - protein, 15 aa, Artificial Sequence
  chemically synthesized
DNCCMYCSWWIACRD

SEQ ID NO: 124 - protein, 15 aa, Artificial Sequence
  chemically synthesized
DSCQWYMLSADLCGT

SEQ ID NO: 125 - protein, 15 aa, Artificial Sequence
  chemically synthesized
DSVCFSSSSFLCHKS

SEQ ID NO: 126 - protein, 15 aa, Artificial Sequence
  chemically synthesized
DTMCAIWWTVCSGGR

SEQ ID NO: 127 - protein, 15 aa, Artificial Sequence
  chemically synthesized
ECTYQTSSFHEACMS

SEQ ID NO: 128 - protein, 15 aa, Artificial Sequence
  chemically synthesized
EGCNLYERSSYGCNN

SEQ ID NO: 129 - protein, 15 aa, Artificial Sequence
  chemically synthesized
EGCTAFAMSAGICGG

SEQ ID NO: 130 - protein, 15 aa, Artificial Sequence
  chemically synthesized
EQSCSLTPIAFCWSE

SEQ ID NO: 131 - protein, 15 aa, Artificial Sequence
  chemically synthesized
EWCNAYISSSKLCST

SEQ ID NO: 132 - protein, 15 aa, Artificial Sequence
  chemically synthesized
FEVCYMFASACRNGM

SEQ ID NO: 133 - protein, 15 aa, Artificial Sequence
  chemically synthesized
FSCSWYAESSSLCDI

SEQ ID NO: 134 - protein, 15 aa, Artificial Sequence
  chemically synthesized
FVCQMFEASSGLCGG

SEQ ID NO: 135 - protein, 15 aa, Artificial Sequence
  chemically synthesized
FYCPCCMFASSCGSR

SEQ ID NO: 136 - protein, 15 aa, Artificial Sequence
  chemically synthesized
FYCSYLPGASHQCSH

SEQ ID NO: 137 - protein, 15 aa, Artificial Sequence
  chemically synthesized
FYCSYLYMCEVCCYE

SEQ ID NO: 138 - protein, 15 aa, Artificial Sequence
  chemically synthesized
GFCTQHTVLTWCPTS

SEQ ID NO: 139 - protein, 15 aa, Artificial Sequence
  chemically synthesized
GSCPSYAVSAGLCYA

SEQ ID NO: 140 - protein, 15 aa, Artificial Sequence
  chemically synthesized
GSQCFLTPTAFCTHT

SEQ ID NO: 141 - protein, 15 aa, Artificial Sequence
  chemically synthesized
GTCHPYMQSSKICNN

SEQ ID NO: 142 - protein, 15 aa, Artificial Sequence
  chemically synthesized
GVECFVFTGGCGGYG

SEQ ID NO: 143 - protein, 15 aa, Artificial Sequence
  chemically synthesized
HELCNGHWVPCCWAY

SEQ ID NO: 144 - protein, 15 aa, Artificial Sequence
  chemically synthesized
ICDSYYAVSSGLCLL

SEQ ID NO: 145 - protein, 15 aa, Artificial Sequence
  chemically synthesized
IGCAWYVSSAGWCSP

SEQ ID NO: 146 - protein, 15 aa, Artificial Sequence
  chemically synthesized
INLCWMFASECGEHH

SEQ ID NO: 147 - protein, 15 aa, Artificial Sequence
  chemically synthesized
KCWLAEMTNLEHCNM

SEQ ID NO: 148 - protein, 15 aa, Artificial Sequence
  chemically synthesized
KHCSDFAYSSRLCDR

SEQ ID NO: 149 - protein, 15 aa, Artificial Sequence
  chemically synthesized
KVCSSYASSSGLCGW

SEQ ID NO: 150 - protein, 15 aa, Artificial Sequence
  chemically synthesized
LDSCYMFASYCVQAV

SEQ ID NO: 151 - protein, 15 aa, Artificial Sequence
  chemically synthesized
LLACHPIFVTVCQTR

SEQ ID NO: 152 - protein, 15 aa, Artificial Sequence
  chemically synthesized
LLSCPYNPEHVCHTS

SEQ ID NO: 153 - protein, 15 aa, Artificial Sequence
  chemically synthesized
LMCSLYALSSNLCGR

SEQ ID NO: 154 - protein, 15 aa, Artificial Sequence
  chemically synthesized
LMWCVLFLWSWCCRI

SEQ ID NO: 155 - protein, 15 aa, Artificial Sequence
  chemically synthesized
LPICHLTPTAVCTHI

SEQ ID NO: 156 - protein, 15 aa, Artificial Sequence
  chemically synthesized
LSNMCLAFGSCLYAW

SEQ ID NO: 157 - protein, 15 aa, Artificial Sequence
  chemically synthesized
LSRCHPIWYTICQNP

SEQ ID NO: 158 - protein, 15 aa, Artificial Sequence
  chemically synthesized
LTQCMSVHKECGGYE

SEQ ID NO: 159 - protein, 15 aa, Artificial Sequence
  chemically synthesized
LVNCRIWSWVCEEAT

SEQ ID NO: 160 - protein, 15 aa, Artificial Sequence
  chemically synthesized
LYCSWYQMSSAVCKE

SEQ ID NO: 161 - protein, 15 aa, Artificial Sequence
  chemically synthesized
MECGWYALSARFCEV

SEQ ID NO: 162 - protein, 15 aa, Artificial Sequence
  chemically synthesized
MTCSPYAMSAHFCNE

SEQ ID NO: 163 - protein, 15 aa, Artificial Sequence
  chemically synthesized
MVCSLYAYSASLCGA

SEQ ID NO: 164 - protein, 15 aa, Artificial Sequence
  chemically synthesized
NALCWSTFSWWCDMD

SEQ ID NO: 165 - protein, 15 aa, Artificial Sequence
  chemically synthesized
NFTCMLTPKAYCVQT

SEQ ID NO: 166 - protein, 15 aa, Artificial Sequence
  chemically synthesized
NGACIFTLSWCTNKT

SEQ ID NO: 167 - protein, 15 aa, Artificial Sequence
  chemically synthesized
NGCELYAAASGLCRT

SEQ ID NO: 168 - protein, 15 aa, Artificial Sequence
  chemically synthesized
NIECSVFGRCCCDNY

SEQ ID NO: 169 - protein, 15 aa, Artificial Sequence
  chemically synthesized
PACRPMFWNRSCDNI

SEQ ID NO: 170 - protein, 15 aa, Artificial Sequence
  chemically synthesized
PCRVSNMFFPYNCLD

SEQ ID NO: 171 - protein, 15 aa, Artificial Sequence
  chemically synthesized
PIMCMLLPESYCWIW

SEQ ID NO: 172 - protein, 15 aa, Artificial Sequence
  chemically synthesized
PQSCYMFASLCMPNG

SEQ ID NO: 173 - protein, 15 aa, Artificial Sequence
  chemically synthesized
PRCPQGLPLYQCSSF

SEQ ID NO: 174 - protein, 15 aa, Artificial Sequence
  chemically synthesized
PSVECLVFKRCYALP

SEQ ID NO: 175 - protein, 15 aa, Artificial Sequence
  chemically synthesized
PVCQRSATIYNCNWF

SEQ ID NO: 176 - protein, 15 aa, Artificial Sequence
  chemically synthesized
QCAAYYISSFGGCSN

SEQ ID NO: 177 - protein, 15 aa, Artificial Sequence
  chemically synthesized
QFGCFMLARDFCGTY

SEQ ID NO: 178 - protein, 15 aa, Artificial Sequence
  chemically synthesized
QMMCPYNPEHKCHQK

SEQ ID NO: 179 - protein, 15 aa, Artificial Sequence
  chemically synthesized
QRECWMFASSCNSKN

SEQ ID NO: 180 - protein, 15 aa, Artificial Sequence
  chemically synthesized
QSNMCTTYICSSFNY

SEQ ID NO: 181 - protein, 15 aa, Artificial Sequence
  chemically synthesized
QSRCHSLAPYLCSSF

SEQ ID NO: 182 - protein, 15 aa, Artificial Sequence
  chemically synthesized
RAYCSLLFADSCNNN

SEQ ID NO: 183 - protein, 15 aa, Artificial Sequence
  chemically synthesized
RCIGINQYIDSNCYN

SEQ ID NO: 184 - protein, 15 aa, Artificial Sequence
  chemically synthesized
RLSCFMFASQCALEF

SEQ ID NO: 185 - protein, 15 aa, Artificial Sequence
  chemically synthesized
RQCIILMNHRQCFFK

SEQ ID NO: 186 - protein, 15 aa, Artificial Sequence
  chemically synthesized
RSCTPYMMSSSLCNT

SEQ ID NO: 187 - protein, 15 aa, Artificial Sequence
  chemically synthesized
RYCHYWKMPYECSSF

SEQ ID NO: 188 - protein, 15 aa, Artificial Sequence
  chemically synthesized
SCVSLSWFDMLKCYE

SEQ ID NO: 189 - protein, 15 aa, Artificial Sequence
  chemically synthesized
SDNCEIWWTVCSAAM

SEQ ID NO: 190 - protein, 15 aa, Artificial Sequence
  chemically synthesized
SFCWSYLVSSGLCGV

SEQ ID NO: 191 - protein, 15 aa, Artificial Sequence
  chemically synthesized
SMCMNNYGTTIMCGN

SEQ ID NO: 192 - protein, 15 aa, Artificial Sequence
  chemically synthesized
SMVGCGWSTFCPSRG

SEQ ID NO: 193 - protein, 15 aa, Artificial Sequence
  chemically synthesized
SSLHCANGHTCPFCL

SEQ ID NO: 194 - protein, 15 aa, Artificial Sequence
  chemically synthesized
SVCSYYEESSGICSP

SEQ ID NO: 195 - protein, 15 aa, Artificial Sequence
  chemically synthesized
SWCGWYAASSGVCAL

SEQ ID NO: 196 - protein, 15 aa, Artificial Sequence
  chemically synthesized
TCISQTIDSYLNCVN

SEQ ID NO: 197 - protein, 15 aa, Artificial Sequence
  chemically synthesized
TFCNLYTKSSNICMS

SEQ ID NO: 198 - protein, 15 aa, Artificial Sequence
  chemically synthesized
TYCVFHEYLDNTCNN

SEQ ID NO: 199 - protein, 15 aa, Artificial Sequence
  chemically synthesized
VATGCPNLMLCGSWP

SEQ ID NO: 200 - protein, 15 aa, Artificial Sequence
  chemically synthesized
VEYCSLLLGNRCDYW

SEQ ID NO: 201 - protein, 15 aa, Artificial Sequence
  chemically synthesized
VGCNMYLMSAGLCVD

SEQ ID NO: 202 - protein, 15 aa, Artificial Sequence
  chemically synthesized
VLYCSWDSGTCVGSH

SEQ ID NO: 203 - protein, 15 aa, Artificial Sequence
  chemically synthesized
VMFSCYYLETCAPGV

SEQ ID NO: 204 - protein, 15 aa, Artificial Sequence
  chemically synthesized
VRIGLCPESCLVSGF

SEQ ID NO: 205 - protein, 15 aa, Artificial Sequence
  chemically synthesized
VTCTYYATSSSLCNT

SEQ ID NO: 206 - protein, 15 aa, Artificial Sequence
  chemically synthesized
VTGCILLPKAWCWGD

SEQ ID NO: 207 - protein, 15 aa, Artificial Sequence
  chemically synthesized
VWCSIYEYSSNLCSR

SEQ ID NO: 208 - protein, 15 aa, Artificial Sequence
  chemically synthesized
WMLECQYNNTCNNMT

SEQ ID NO: 209 - protein, 15 aa, Artificial Sequence
  chemically synthesized
WPCSPLEYYNNICNV

SEQ ID NO: 210 - protein, 15 aa, Artificial Sequence
  chemically synthesized
WTYDCHLNQTCPTYY

SEQ ID NO: 211 - protein, 15 aa, Artificial Sequence
  chemically synthesized
YCSINMYLIGGNCMY

SEQ ID NO: 212 - protein, 15 aa, Artificial Sequence
  chemically synthesized
YFCSLYANSAGFCGG

SEQ ID NO: 213 - protein, 15 aa, Artificial Sequence
  chemically synthesized
YVSCYMFSSSCPSTW

SEQ ID NO: 214 - protein, 13 aa, Artificial Sequence
  chemically synthesized
ISSGLLSGRSDNH

SEQ ID NO: 215 - protein, 158 aa, Artificial Sequence
  chemically synthesized
QGQSGQGAMSGCSWSAFCPYLAGGGSSGGSISSGLLSGRSDNHGGGSDIQLTQSPSSLSASVGDRVTITCRASESVDSYGISFMNWFQQKPGKAPKLLIYAASNQGSGVPSRFSGSGSGTDFTLTISSMQPEDFATYYCQQSKDVPWTFGQGTKLEIK

SEQ ID NO: 216 - DNA, 474 bp, Artificial Sequence
  chemically synthesized
caaggccagtctggccaaggtgcgatgagtgggtgctcgtggtctgctttttgcccgtatttggcgggaggtggctcgagcggcggctctatctcttccggactgctgtccggcagatccgacaatcacggcggaggatccgacatccagctgacccagagccctagcagcctgtctgccagcgtgggcgacagagtgaccatcacctgtagagccagcgagagcgtggacagttacggcatcagcttcatgaactggttccagcagaagcccggcaaggcccccaagctgctgatctacgccgccagcaatcagggcagcggcgtgccaagcagattttccggctctggcagcggcaccgacttcaccctgaccatcagcagcatgcagcccgaggacttcgccacctactactgccagcagagcaaggacgtgccctggacctttggccagggtaccaagctggaaatcaag

SEQ ID NO: 217 - protein, 158 aa, Artificial Sequence
  chemically synthesized
QGQSGQGDVNCAIWYSVCTTVPGGGSSGGSISSGLLSGRSDNHGGGSDIQLTQSPSSLSASVGDRVTITCRASESVDSYGISFMNWFQQKPGKAPKLLIYAASNQGSGVPSRFSGSGSGTDFTLTISSMQPEDFATYYCQQSKDVPWTFGQGTKLEIK

SEQ ID NO: 218 - DNA, 474 bp, Artificial Sequence
  chemically synthesized
caaggccagtctggccaaggtgatgttaattgcgctatttggtattcggtgtgcactactgttcctggaggtggctcgagcggcggctctatctcttccggactgctgtccggcagatccgacaatcacggcggaggatccgacatccagctgacccagagccctagcagcctgtctgccagcgtgggcgacagagtgaccatcacctgtagagccagcgagagcgtggacagttacggcatcagcttcatgaactggttccagcagaagcccggcaaggcccccaagctgctgatctacgccgccagcaatcagggcagcggcgtgccaagcagattttccggctctggcagcggcaccgacttcaccctgaccatcagcagcatgcagcccgaggacttcgccacctactactgccagcagagcaaggacgtgccctggacctttggccagggtaccaagctggaaatcaag

SEQ ID NO: 219 - protein, 158 aa, Artificial Sequence
  chemically synthesized
QGQSGQGLVCPLYALSSGVCMGGGGSSGGSISSGLLSGRSDNHGGGSDIQLTQSPSSLSASVGDRVTITCRASESVDSYGISFMNWFQQKPGKAPKLLIYAASNQGSGVPSRFSGSGSGTDFTLTISSMQPEDFATYYCQQSKDVPWTFGQGTKLEIK

SEQ ID NO: 220 - DNA, 474 bp, Artificial Sequence
  chemically synthesized
caaggccagtctggccaaggtttggtttgccctttgtatgcattgagttctggggtgtgcatggggggaggtggctcgagcggcggctctatctcttccggactgctgtccggcagatccgacaatcacggcggaggatccgacatccagctgacccagagccctagcagcctgtctgccagcgtgggcgacagagtgaccatcacctgtagagccagcgagagcgtggacagttacggcatcagcttcatgaactggttccagcagaagcccggcaaggcccccaagctgctgatctacgccgccagcaatcagggcagcggcgtgccaagcagattttccggctctggcagcggcaccgacttcaccctgaccatcagcagcatgcagcccgaggacttcgccacctactactgccagcagagcaaggacgtgccctggacctttggccagggtaccaagctggaaatcaag

SEQ ID NO: 221 - protein, 158 aa, Artificial Sequence
  chemically synthesized
QGQSGQGETCNQYERSSGLCFAGGGSSGGSISSGLLSGRSDNHGGGSDIQLTQSPSSLSASVGDRVTITCRASESVDSYGISFMNWFQQKPGKAPKLLIYAASNQGSGVPSRFSGSGSGTDFTLTISSMQPEDFATYYCQQSKDVPWTFGQGTKLEIK

SEQ ID NO: 222 - DNA, 474 bp, Artificial Sequence
  chemically synthesized
caaggccagtctggccaaggtgagacttgcaatcagtatgagaggtcgagtggtttgtgctttgcgggaggtggctcgagcggcggctctatctcttccggactgctgtccggcagatccgacaatcacggcggaggatccgacatccagctgacccagagccctagcagcctgtctgccagcgtgggcgacagagtgaccatcacctgtagagccagcgagagcgtggacagttacggcatcagcttcatgaactggttccagcagaagcccggcaaggcccccaagctgctgatctacgccgccagcaatcagggcagcggcgtgccaagcagattttccggctctggcagcggcaccgacttcaccctgaccatcagcagcatgcagcccgaggacttcgccacctactactgccagcagagcaaggacgtgccctggacctttggccagggtaccaagctggaaatcaag

SEQ ID NO: 223 - protein, 158 aa, Artificial Sequence
  chemically synthesized
QGQSGQGAPRTCYTYQCSSFYTGGGSSGGSISSGLLSGRSDNHGGGSDIQLTQSPSSLSASVGDRVTITCRASESVDSYGISFMNWFQQKPGKAPKLLIYAASNQGSGVPSRFSGSGSGTDFTLTISSMQPEDFATYYCQQSKDVPWTFGQGTKLEIK

SEQ ID NO: 224 - DNA, 474 bp, Artificial Sequence
  chemically synthesized
caaggccagtctggccaaggtgcgccgcggacgtgctatacgtatcagtgctctagtttttatactggaggtggctcgagcggcggctctatctcttccggactgctgtccggcagatccgacaatcacggcggaggatccgacatccagctgacccagagccctagcagcctgtctgccagcgtgggcgacagagtgaccatcacctgtagagccagcgagagcgtggacagttacggcatcagcttcatgaactggttccagcagaagcccggcaaggcccccaagctgctgatctacgccgccagcaatcagggcagcggcgtgccaagcagattttccggctctggcagcggcaccgacttcaccctgaccatcagcagcatgcagcccgaggacttcgccacctactactgccagcagagcaaggacgtgccctggacctttggccagggtaccaagctggaaatcaag

SEQ ID NO: 225 - protein, 158 aa, Artificial Sequence
  chemically synthesized
QGQSGQGGLCSWYLSSSGLCVDGGGSSGGSISSGLLSGRSDNHGGGSDIQLTQSPSSLSASVGDRVTITCRASESVDSYGISFMNWFQQKPGKAPKLLIYAASNQGSGVPSRFSGSGSGTDFTLTISSMQPEDFATYYCQQSKDVPWTFGQGTKLEIK

SEQ ID NO: 226 - DNA, 474 bp, Artificial Sequence
  chemically synthesized
caaggccagtctggccaaggtggtctttgcagttggtatcttagtagttcgggtttgtgcgtggatggaggtggctcgagcggcggctctatctcttccggactgctgtccggcagatccgacaatcacggcggaggatccgacatccagctgacccagagccctagcagcctgtctgccagcgtgggcgacagagtgaccatcacctgtagagccagcgagagcgtggacagttacggcatcagcttcatgaactggttccagcagaagcccggcaaggcccccaagctgctgatctacgccgccagcaatcagggcagcggcgtgccaagcagattttccggctctggcagcggcaccgacttcaccctgaccatcagcagcatgcagcccgaggacttcgccacctactactgccagcagagcaaggacgtgccctggacctttggccagggtaccaagctggaaatcaag

SEQ ID NO: 227 - protein, 158 aa, Artificial Sequence
  chemically synthesized
QGQSGQGAMSGCSWSAFCPYLAGGGSSGGSISSGLLSGRSDNHGGGSDIQLTQSPSSLSASVGDRVTITCRASESVDAYGISFMNWFQQKPGKAPKLLIYAASNQGSGVPSRFSGSGSGTDFTLTISSMQPEDFATYYCQQSKDVPWTFGQGTKLEIK

SEQ ID NO: 228 - DNA, 474 bp, Artificial Sequence
  chemically synthesized
caaggccagtctggccaaggtgcgatgagtgggtgctcgtggtctgctttttgcccgtatttggcgggaggtggctcgagcggcggctctatctcttccggactgctgtccggcagatccgacaatcacggcggaggatccgatatccagctgacccagagccctagcagcctgtctgccagcgtgggcgacagagtgaccatcacctgtagagccagcgagagcgtggacgcttacggcatcagcttcatgaactggttccagcagaagcccggcaaggcccccaagctgctgatctacgccgccagcaatcagggcagcggcgtgccaagcagattttccggctctggcagcggcaccgacttcaccctgaccatcagcagcatgcagcccgaggacttcgccacctactactgccagcagagcaaggacgtgccctggacctttggccagggtaccaagctggaaatcaag

SEQ ID NO: 229 - protein, 158 aa, Artificial Sequence
  chemically synthesized
QGQSGQGDVNCAIWYSVCTTVPGGGSSGGSISSGLLSGRSDNHGGGSDIQLTQSPSSLSASVGDRVTITCRASESVDAYGISFMNWFQQKPGKAPKLLIYAASNQGSGVPSRFSGSGSGTDFTLTISSMQPEDFATYYCQQSKDVPWTFGQGTKLEIK

SEQ ID NO: 230 - DNA, 474 bp, Artificial Sequence
  chemically synthesized
caaggccagtctggccaaggtgatgttaattgcgctatttggtattcggtgtgcactactgttcctggaggtggctcgagcggcggctctatctcttccggactgctgtccggcagatccgacaatcacggcggaggatccgatatccagctgacccagagccctagcagcctgtctgccagcgtgggcgacagagtgaccatcacctgtagagccagcgagagcgtggacgcttacggcatcagcttcatgaactggttccagcagaagcccggcaaggcccccaagctgctgatctacgccgccagcaatcagggcagcggcgtgccaagcagattttccggctctggcagcggcaccgacttcaccctgaccatcagcagcatgcagcccgaggacttcgccacctactactgccagcagagcaaggacgtgccctggacctttggccagggtaccaagctggaaatcaag

SEQ ID NO: 231 - protein, 158 aa, Artificial Sequence
  chemically synthesized
QGQSGQGLVCPLYALSSGVCMGGGGSSGGSISSGLLSGRSDNHGGGSDIQLTQSPSSLSASVGDRVTITCRASESVDAYGISFMNWFQQKPGKAPKLLIYAASNQGSGVPSRFSGSGSGTDFTLTISSMQPEDFATYYCQQSKDVPWTFGQGTKLEIK

SEQ ID NO: 232 - DNA, 474 bp, Artificial Sequence
  chemically synthesized
caaggccagtctggccaaggtttggtttgccctttgtatgcattgagttctggggtgtgcatggggggaggtggctcgagcggcggctctatctcttccggactgctgtccggcagatccgacaatcacggcggaggatccgatatccagctgacccagagccctagcagcctgtctgccagcgtgggcgacagagtgaccatcacctgtagagccagcgagagcgtggacgcttacggcatcagcttcatgaactggttccagcagaagcccggcaaggcccccaagctgctgatctacgccgccagcaatcagggcagcggcgtgccaagcagattttccggctctggcagcggcaccgacttcaccctgaccatcagcagcatgcagcccgaggacttcgccacctactactgccagcagagcaaggacgtgccctggacctttggccagggtaccaagctggaaatcaag

SEQ ID NO: 233 - protein, 158 aa, Artificial Sequence
  chemically synthesized
QGQSGQGSVNCRIWSAVCAGYEGGGSSGGSISSGLLSGRSDNHGGGSDIQLTQSPSSLSASVGDRVTITCRASESVDAYGISFMNWFQQKPGKAPKLLIYAASNQGSGVPSRFSGSGSGTDFTLTISSMQPEDFATYYCQQSKDVPWTFGQGTKLEIK

SEQ ID NO: 234 - DNA, 474 bp, Artificial Sequence
  chemically synthesized
caaggccagtctggccaaggttctgtgaattgccggatttggtcggctgtttgcgcggggtatgagggaggtggctcgagcggcggctctatctcttccggactgctgtccggcagatccgacaatcacggcggaggatccgatatccagctgacccagagccctagcagcctgtctgccagcgtgggcgacagagtgaccatcacctgtagagccagcgagagcgtggacgcttacggcatcagcttcatgaactggttccagcagaagcccggcaaggcccccaagctgctgatctacgccgccagcaatcagggcagcggcgtgccaagcagattttccggctctggcagcggcaccgacttcaccctgaccatcagcagcatgcagcccgaggacttcgccacctactactgccagcagagcaaggacgtgccctggacctttggccagggtaccaagctggaaatcaag

SEQ ID NO: 235 - protein, 158 aa, Artificial Sequence
  chemically synthesized
QGQSGQGMLVCSLQPTAMCERVGGGSSGGSISSGLLSGRSDNHGGGSDIQLTQSPSSLSASVGDRVTITCRASESVDAYGISFMNWFQQKPGKAPKLLIYAASNQGSGVPSRFSGSGSGTDFTLTISSMQPEDFATYYCQQSKDVPWTFGQGTKLEIK

SEQ ID NO: 236 - DNA, 474 bp, Artificial Sequence
  chemically synthesized
caaggccagtctggccaaggtatgcttgtgtgctcgttgcagcctactgcgatgtgcgagcgggtgggaggtggctcgagcggcggctctatctcttccggactgctgtccggcagatccgacaatcacggcggaggatccgatatccagctgacccagagccctagcagcctgtctgccagcgtgggcgacagagtgaccatcacctgtagagccagcgagagcgtggacgcttacggcatcagcttcatgaactggttccagcagaagcccggcaaggcccccaagctgctgatctacgccgccagcaatcagggcagcggcgtgccaagcagattttccggctctggcagcggcaccgacttcaccctgaccatcagcagcatgcagcccgaggacttcgccacctactactgccagcagagcaaggacgtgccctggacctttggccagggtaccaagctggaaatcaag

SEQ ID NO: 237 - protein, 158 aa, Artificial Sequence
  chemically synthesized
QGQSGQGAPRCYMFASYCKSQYGGGSSGGSISSGLLSGRSDNHGGGSDIQLTQSPSSLSASVGDRVTITCRASESVDAYGISFMNWFQQKPGKAPKLLIYAASNQGSGVPSRFSGSGSGTDFTLTISSMQPEDFATYYCQQSKDVPWTFGQGTKLEIK

SEQ ID NO: 238 - DNA, 474 bp, Artificial Sequence
  chemically synthesized
caaggccagtctggccaaggtgcgcctaggtgctatatgtttgcgtcgtattgcaagagtcagtatggaggtggctcgagcggcggctctatctcttccggactgctgtccggcagatccgacaatcacggcggaggatccgatatccagctgacccagagccctagcagcctgtctgccagcgtgggcgacagagtgaccatcacctgtagagccagcgagagcgtggacgcttacggcatcagcttcatgaactggttccagcagaagcccggcaaggcccccaagctgctgatctacgccgccagcaatcagggcagcggcgtgccaagcagattttccggctctggcagcggcaccgacttcaccctgaccatcagcagcatgcagcccgaggacttcgccacctactactgccagcagagcaaggacgtgccctggacctttggccagggtaccaagctggaaatcaag

SEQ ID NO: 239 - protein, 158 aa, Artificial Sequence
  chemically synthesized
QGQSGQGVGPCELTPKPVCNTYGGGSSGGSISSGLLSGRSDNHGGGSDIQLTQSPSSLSASVGDRVTITCRASESVDAYGISFMNWFQQKPGKAPKLLIYAASNQGSGVPSRFSGSGSGTDFTLTISSMQPEDFATYYCQQSKDVPWTFGQGTKLEIK

SEQ ID NO: 240 - DNA, 474 bp, Artificial Sequence
  chemically synthesized
caaggccagtctggccaaggtgtggggccttgcgagttgacgccgaagcctgtttgcaatacgtatggaggtggctcgagcggcggctctatctcttccggactgctgtccggcagatccgacaatcacggcggaggatccgatatccagctgacccagagccctagcagcctgtctgccagcgtgggcgacagagtgaccatcacctgtagagccagcgagagcgtggacgcttacggcatcagcttcatgaactggttccagcagaagcccggcaaggcccccaagctgctgatctacgccgccagcaatcagggcagcggcgtgccaagcagattttccggctctggcagcggcaccgacttcaccctgaccatcagcagcatgcagcccgaggacttcgccacctactactgccagcagagcaaggacgtgccctggacctttggccagggtaccaagctggaaatcaag

SEQ ID NO: 241 - protein, 158 aa, Artificial Sequence
  chemically synthesized
QGQSGQGETCNQYERSSGLCFAGGGSSGGSISSGLLSGRSDNHGGGSDIQLTQSPSSLSASVGDRVTITCRASESVDAYGISFMNWFQQKPGKAPKLLIYAASNQGSGVPSRFSGSGSGTDFTLTISSMQPEDFATYYCQQSKDVPWTFGQGTKLEIK

SEQ ID NO: 242 - DNA, 474 bp, Artificial Sequence
  chemically synthesized
caaggccagtctggccaaggtgagacttgcaatcagtatgagaggtcgagtggtttgtgctttgcgggaggtggctcgagcggcggctctatctcttccggactgctgtccggcagatccgacaatcacggcggaggatccgatatccagctgacccagagccctagcagcctgtctgccagcgtgggcgacagagtgaccatcacctgtagagccagcgagagcgtggacgcttacggcatcagcttcatgaactggttccagcagaagcccggcaaggcccccaagctgctgatctacgccgccagcaatcagggcagcggcgtgccaagcagattttccggctctggcagcggcaccgacttcaccctgaccatcagcagcatgcagcccgaggacttcgccacctactactgccagcagagcaaggacgtgccctggacctttggccagggtaccaagctggaaatcaag

SEQ ID NO: 243 - protein, 158 aa, Artificial Sequence
  chemically synthesized
QGQSGQGAPRTCYTYQCSSFYTGGGSSGGSISSGLLSGRSDNHGGGSDIQLTQSPSSLSASVGDRVTITCRASESVDAYGISFMNWFQQKPGKAPKLLIYAASNQGSGVPSRFSGSGSGTDFTLTISSMQPEDFATYYCQQSKDVPWTFGQGTKLEIK

SEQ ID NO: 244 - DNA, 474 bp, Artificial Sequence
  chemically synthesized
caaggccagtctggccaaggtgcgccgcggacgtgctatacgtatcagtgctctagtttttatactggaggtggctcgagcggcggctctatctcttccggactgctgtccggcagatccgacaatcacggcggaggatccgatatccagctgacccagagccctagcagcctgtctgccagcgtgggcgacagagtgaccatcacctgtagagccagcgagagcgtggacgcttacggcatcagcttcatgaactggttccagcagaagcccggcaaggcccccaagctgctgatctacgccgccagcaatcagggcagcggcgtgccaagcagattttccggctctggcagcggcaccgacttcaccctgaccatcagcagcatgcagcccgaggacttcgccacctactactgccagcagagcaaggacgtgccctggacctttggccagggtaccaagctggaaatcaag

SEQ ID NO: 245 - protein, 158 aa, Artificial Sequence
  chemically synthesized
QGQSGQGGLCSWYLSSSGLCVDGGGSSGGSISSGLLSGRSDNHGGGSDIQLTQSPSSLSASVGDRVTITCRASESVDAYGISFMNWFQQKPGKAPKLLIYAASNQGSGVPSRFSGSGSGTDFTLTISSMQPEDFATYYCQQSKDVPWTFGQGTKLEIK

SEQ ID NO: 246 - DNA, 474 bp, Artificial Sequence
  chemically synthesized
caaggccagtctggccaaggtggtctttgcagttggtatcttagtagttcgggtttgtgcgtggatggaggtggctcgagcggcggctctatctcttccggactgctgtccggcagatccgacaatcacggcggaggatccgatatccagctgacccagagccctagcagcctgtctgccagcgtgggcgacagagtgaccatcacctgtagagccagcgagagcgtggacgcttacggcatcagcttcatgaactggttccagcagaagcccggcaaggcccccaagctgctgatctacgccgccagcaatcagggcagcggcgtgccaagcagattttccggctctggcagcggcaccgacttcaccctgaccatcagcagcatgcagcccgaggacttcgccacctactactgccagcagagcaaggacgtgccctggacctttggccagggtaccaagctggaaatcaag

SEQ ID NO: 247 - protein, 158 aa, Artificial Sequence
  chemically synthesized
QGQSGQGVPWCQLTPRVMCMWAGGGSSGGSISSGLLSGRSDNHGGGSDIQLTQSPSSLSASVGDRVTITCRASESVDAYGISFMNWFQQKPGKAPKLLIYAASNQGSGVPSRFSGSGSGTDFTLTISSMQPEDFATYYCQQSKDVPWTFGQGTKLEIK

SEQ ID NO: 248 - DNA, 474 bp, Artificial Sequence
  chemically synthesized
caaggccagtctggccaaggtgtgccttggtgccagttgacgccgcgggttatgtgcatgtgggcgggaggtggctcgagcggcggctctatctcttccggactgctgtccggcagatccgacaatcacggcggaggatccgatatccagctgacccagagccctagcagcctgtctgccagcgtgggcgacagagtgaccatcacctgtagagccagcgagagcgtggacgcttacggcatcagcttcatgaactggttccagcagaagcccggcaaggcccccaagctgctgatctacgccgccagcaatcagggcagcggcgtgccaagcagattttccggctctggcagcggcaccgacttcaccctgaccatcagcagcatgcagcccgaggacttcgccacctactactgccagcagagcaaggacgtgccctggacctttggccagggtaccaagctggaaatcaag

SEQ ID NO: 249 - protein, 158 aa, Artificial Sequence
  chemically synthesized
QGQSGQGNWLDCQFYSECSVYGGGGSSGGSISSGLLSGRSDNHGGGSDIQLTQSPSSLSASVGDRVTITCRASESVDAYGISFMNWFQQKPGKAPKLLIYAASNQGSGVPSRFSGSGSGTDFTLTISSMQPEDFATYYCQQSKDVPWTFGQGTKLEIK

SEQ ID NO: 250 - DNA, 474 bp, Artificial Sequence
  chemically synthesized
caaggccagtctggccaaggtaattggttggattgccagttttattctgagtgctctgtttatggtggaggtggctcgagcggcggctctatctcttccggactgctgtccggcagatccgacaatcacggcggaggatccgatatccagctgacccagagccctagcagcctgtctgccagcgtgggcgacagagtgaccatcacctgtagagccagcgagagcgtggacgcttacggcatcagcttcatgaactggttccagcagaagcccggcaaggcccccaagctgctgatctacgccgccagcaatcagggcagcggcgtgccaagcagattttccggctctggcagcggcaccgacttcaccctgaccatcagcagcatgcagcccgaggacttcgccacctactactgccagcagagcaaggacgtgccctggacctttggccagggtaccaagctggaaatcaag

SEQ ID NO: 251 - protein, 158 aa, Artificial Sequence
  chemically synthesized
QGQSGQGSCPLYVMSSFGGCWDGGGSSGGSISSGLLSGRSDNHGGGSDIQLTQSPSSLSASVGDRVTITCRASESVDAYGISFMNWFQQKPGKAPKLLIYAASNQGSGVPSRFSGSGSGTDFTLTISSMQPEDFATYYCQQSKDVPWTFGQGTKLEIK

SEQ ID NO: 252 - DNA, 474 bp, Artificial Sequence
  chemically synthesized
caaggccagtctggccaaggttcgtgccctttgtatgtgatgtctagttttggtgggtgctgggatggaggtggctcgagcggcggctctatctcttccggactgctgtccggcagatccgacaatcacggcggaggatccgatatccagctgacccagagccctagcagcctgtctgccagcgtgggcgacagagtgaccatcacctgtagagccagcgagagcgtggacgcttacggcatcagcttcatgaactggttccagcagaagcccggcaaggcccccaagctgctgatctacgccgccagcaatcagggcagcggcgtgccaagcagattttccggctctggcagcggcaccgacttcaccctgaccatcagcagcatgcagcccgaggacttcgccacctactactgccagcagagcaaggacgtgccctggacctttggccagggtaccaagctggaaatcaag

SEQ ID NO: 253 - protein, 158 aa, Artificial Sequence
  chemically synthesized
QGQSGQGMSHCWMFSSSCDGVKGGGSSGGSISSGLLSGRSDNHGGGSDIQLTQSPSSLSASVGDRVTITCRASESVDAYGISFMNWFQQKPGKAPKLLIYAASNQGSGVPSRFSGSGSGTDFTLTISSMQPEDFATYYCQQSKDVPWTFGQGTKLEIK

SEQ ID NO: 254 - DNA, 474 bp, Artificial Sequence
  chemically synthesized
caaggccagtctggccaaggtatgagtcattgctggatgttttcgagttcttgcgatggggtgaagggaggtggctcgagcggcggctctatctcttccggactgctgtccggcagatccgacaatcacggcggaggatccgatatccagctgacccagagccctagcagcctgtctgccagcgtgggcgacagagtgaccatcacctgtagagccagcgagagcgtggacgcttacggcatcagcttcatgaactggttccagcagaagcccggcaaggcccccaagctgctgatctacgccgccagcaatcagggcagcggcgtgccaagcagattttccggctctggcagcggcaccgacttcaccctgaccatcagcagcatgcagcccgaggacttcgccacctactactgccagcagagcaaggacgtgccctggacctttggccagggtaccaagctggaaatcaag

SEQ ID NO: 255 - protein, 158 aa, Artificial Sequence
  chemically synthesized
QGQSGQGVSYCTWLIEVTCLRGGGGSSGGSISSGLLSGRSDNHGGGSDIQLTQSPSSLSASVGDRVTITCRASESVDAYGISFMNWFQQKPGKAPKLLIYAASNQGSGVPSRFSGSGSGTDFTLTISSMQPEDFATYYCQQSKDVPWTFGQGTKLEIK

SEQ ID NO: 256 - DNA, 474 bp, Artificial Sequence
  chemically synthesized
caaggccagtctggccaaggtgtttcgtattgcacgtggttgattgaggtgacttgcctgaggggtggaggtggctcgagcggcggctctatctcttccggactgctgtccggcagatccgacaatcacggcggaggatccgatatccagctgacccagagccctagcagcctgtctgccagcgtgggcgacagagtgaccatcacctgtagagccagcgagagcgtggacgcttacggcatcagcttcatgaactggttccagcagaagcccggcaaggcccccaagctgctgatctacgccgccagcaatcagggcagcggcgtgccaagcagattttccggctctggcagcggcaccgacttcaccctgaccatcagcagcatgcagcccgaggacttcgccacctactactgccagcagagcaaggacgtgccctggacctttggccagggtaccaagctggaaatcaag

SEQ ID NO: 257 - protein, 158 aa, Artificial Sequence
  chemically synthesized
QGQSGQGVLCAAYALSSGICGGGGGSSGGSISSGLLSGRSDNHGGGSDIQLTQSPSSLSASVGDRVTITCRASESVDAYGISFMNWFQQKPGKAPKLLIYAASNQGSGVPSRFSGSGSGTDFTLTISSMQPEDFATYYCQQSKDVPWTFGQGTKLEIK

SEQ ID NO: 258 - DNA, 474 bp, Artificial Sequence
  chemically synthesized
caaggccagtctggccaaggtgttttgtgcgctgcttatgctttgagttcgggtatttgcggtgggggaggtggctcgagcggcggctctatctcttccggactgctgtccggcagatccgacaatcacggcggaggatccgatatccagctgacccagagccctagcagcctgtctgccagcgtgggcgacagagtgaccatcacctgtagagccagcgagagcgtggacgcttacggcatcagcttcatgaactggttccagcagaagcccggcaaggcccccaagctgctgatctacgccgccagcaatcagggcagcggcgtgccaagcagattttccggctctggcagcggcaccgacttcaccctgaccatcagcagcatgcagcccgaggacttcgccacctactactgccagcagagcaaggacgtgccctggacctttggccagggtaccaagctggaaatcaag

SEQ ID NO: 259 - protein, 158 aa, Artificial Sequence
  chemically synthesized
QGQSGQGTTCNLYQQSSMFCNAGGGSSGGSISSGLLSGRSDNHGGGSDIQLTQSPSSLSASVGDRVTITCRASESVDAYGISFMNWFQQKPGKAPKLLIYAASNQGSGVPSRFSGSGSGTDFTLTISSMQPEDFATYYCQQSKDVPWTFGQGTKLEIK

SEQ ID NO: 260 - DNA, 474 bp, Artificial Sequence
  chemically synthesized
caaggccagtctggccaaggtacgacttgcaatctgtatcagcagtcttctatgttttgcaatgctggaggtggctcgagcggcggctctatctcttccggactgctgtccggcagatccgacaatcacggcggaggatccgatatccagctgacccagagccctagcagcctgtctgccagcgtgggcgacagagtgaccatcacctgtagagccagcgagagcgtggacgcttacggcatcagcttcatgaactggttccagcagaagcccggcaaggcccccaagctgctgatctacgccgccagcaatcagggcagcggcgtgccaagcagattttccggctctggcagcggcaccgacttcaccctgaccatcagcagcatgcagcccgaggacttcgccacctactactgccagcagagcaaggacgtgccctggacctttggccagggtaccaagctggaaatcaag

SEQ ID NO: 261 - protein, 158 aa, Artificial Sequence; identical to SEQ ID NO: 237
  chemically synthesized

SEQ ID NO: 262 - DNA, 474 bp, Artificial Sequence; identical to SEQ ID NO: 238
  chemically synthesized

SEQ ID NO: 263 - protein, 158 aa, Artificial Sequence
  chemically synthesized
QGQSGQGPCDQNPYFYPYVCHAGGGSSGGSISSGLLSGRSDNHGGGSDIQLTQSPSSLSASVGDRVTITCRASESVDAYGISFMNWFQQKPGKAPKLLIYAASNQGSGVPSRFSGSGSGTDFTLTISSMQPEDFATYYCQQSKDVPWTFGQGTKLEIK

SEQ ID NO: 264 - DNA, 474 bp, Artificial Sequence
  chemically synthesized
caaggccagtctggccaaggtccttgcgatcagaatccgtatttttatccgtatgtgtgccatgcgggaggtggctcgagcggcggctctatctcttccggactgctgtccggcagatccgacaatcacggcggaggatccgatatccagctgacccagagccctagcagcctgtctgccagcgtgggcgacagagtgaccatcacctgtagagccagcgagagcgtggacgcttacggcatcagcttcatgaactggttccagcagaagcccggcaaggcccccaagctgctgatctacgccgccagcaatcagggcagcggcgtgccaagcagattttccggctctggcagcggcaccgacttcaccctgaccatcagcagcatgcagcccgaggacttcgccacctactactgccagcagagcaaggacgtgccctggacctttggccagggtaccaagctggaaatcaag

SEQ ID NO: 265 - protein, 158 aa, Artificial Sequence
  chemically synthesized
QGQSGQGSVCPMYALSSMLCGAGGGSSGGSISSGLLSGRSDNHGGGSDIQLTQSPSSLSASVGDRVTITCRASESVDAYGISFMNWFQQKPGKAPKLLIYAASNQGSGVPSRFSGSGSGTDFTLTISSMQPEDFATYYCQQSKDVPWTFGQGTKLEIK

SEQ ID NO: 266 - DNA, 474 bp, Artificial Sequence
  chemically synthesized
caaggccagtctggccaaggttctgtgtgccctatgtatgcgttgagttctatgttgtgcggtgcgggaggtggctcgagcggcggctctatctcttccggactgctgtccggcagatccgacaatcacggcggaggatccgatatccagctgacccagagccctagcagcctgtctgccagcgtgggcgacagagtgaccatcacctgtagagccagcgagagcgtggacgcttacggcatcagcttcatgaactggttccagcagaagcccggcaaggcccccaagctgctgatctacgccgccagcaatcagggcagcggcgtgccaagcagattttccggctctggcagcggcaccgacttcaccctgaccatcagcagcatgcagcccgaggacttcgccacctactactgccagcagagcaaggacgtgccctggacctttggccagggtaccaagctggaaatcaag

SEQ ID NO: 267 - protein, 158 aa, Artificial Sequence
  chemically synthesized
QGQSGQGLSVECYVFSRCSSLPGGGSSGGSISSGLLSGRSDNHGGGSDIQLTQSPSSLSASVGDRVTITCRASESVDAYGISFMNWFQQKPGKAPKLLIYAASNQGSGVPSRFSGSGSGTDFTLTISSMQPEDFATYYCQQSKDVPWTFGQGTKLEIK

SEQ ID NO: 268 - DNA, 474 bp, Artificial Sequence
  chemically synthesized
caaggccagtctggccaaggtttgtctgtggagtgctatgtgttttcgcggtgcagtagtctgccgggaggtggctcgagcggcggctctatctcttccggactgctgtccggcagatccgacaatcacggcggaggatccgatatccagctgacccagagccctagcagcctgtctgccagcgtgggcgacagagtgaccatcacctgtagagccagcgagagcgtggacgcttacggcatcagcttcatgaactggttccagcagaagcccggcaaggcccccaagctgctgatctacgccgccagcaatcagggcagcggcgtgccaagcagattttccggctctggcagcggcaccgacttcaccctgaccatcagcagcatgcagcccgaggacttcgccacctactactgccagcagagcaaggacgtgccctggacctttggccagggtaccaagctggaaatcaag

SEQ ID NO: 269 - protein, 157 aa, Artificial Sequence
  chemically synthesized
QGQSGQGFYCTYLVSLTCHPQGGGSSGGSISSGLLSGRSDNHGGGSDIQLTQSPSSLSASVGDRVTITCRASESVDAYGISFMNWFQQKPGKAPKLLIYAASNQGSGVPSRFSGSGSGTDFTLTISSMQPEDFATYYCQQSKDVPWTFGQGTKLEIK

SEQ ID NO: 270 - DNA, 471 bp, Artificial Sequence
  chemically synthesized
caaggccagtctggccaaggtttttattgcacttatttggtgtctttgacttgccatccgcagggaggtggctcgagcggcggctctatctcttccggactgctgtccggcagatccgacaatcacggcggaggatccgatatccagctgacccagagccctagcagcctgtctgccagcgtgggcgacagagtgaccatcacctgtagagccagcgagagcgtggacgcttacggcatcagcttcatgaactggttccagcagaagcccggcaaggcccccaagctgctgatctacgccgccagcaatcagggcagcggcgtgccaagcagattttccggctctggcagcggcaccgacttcaccctgaccatcagcagcatgcagcccgaggacttcgccacctactactgccagcagagcaaggacgtgccctggacctttggccagggtaccaagctggaaatcaag

SEQ ID NO: 271 - protein, 158 aa, Artificial Sequence
  chemically synthesized
QGQSGQGSMAGCQWSSFCVQRDGGGSSGGSISSGLLSGRSDNHGGGSDIQLTQSPSSLSASVGDRVTITCRASESVDAYGISFMNWFQQKPGKAPKLLIYAASNQGSGVPSRFSGSGSGTDFTLTISSMQPEDFATYYCQQSKDVPWTFGQGTKLEIK

SEQ ID NO: 272 - DNA, 474 bp, Artificial Sequence
  chemically synthesized
caaggccagtctggccaaggttctatggcgggttgccagtggagttcgttttgcgtgcagcgggatggaggtggctcgagcggcggctctatctcttccggactgctgtccggcagatccgacaatcacggcggaggatccgatatccagctgacccagagccctagcagcctgtctgccagcgtgggcgacagagtgaccatcacctgtagagccagcgagagcgtggacgcttacggcatcagcttcatgaactggttccagcagaagcccggcaaggcccccaagctgctgatctacgccgccagcaatcagggcagcggcgtgccaagcagattttccggctctggcagcggcaccgacttcaccctgaccatcagcagcatgcagcccgaggacttcgccacctactactgccagcagagcaaggacgtgccctggacctttggccagggtaccaagctggaaatcaag

SEQ ID NO: 273 - protein, 158 aa, Artificial Sequence
  chemically synthesized
QGQSGQGIYSCYMFASRCTSDKGGGSSGGSISSGLLSGRSDNHGGGSDIQLTQSPSSLSASVGDRVTITCRASESVDAYGISFMNWFQQKPGKAPKLLIYAASNQGSGVPSRFSGSGSGTDFTLTISSMQPEDFATYYCQQSKDVPWTFGQGTKLEIK

SEQ ID NO: 274 - DNA, 474 bp, Artificial Sequence
  chemically synthesized
caaggccagtctggccaaggtatttattcgtgctatatgtttgcttcgcggtgcacgtctgataagggaggtggctcgagcggcggctctatctcttccggactgctgtccggcagatccgacaatcacggcggaggatccgatatccagctgacccagagccctagcagcctgtctgccagcgtgggcgacagagtgaccatcacctgtagagccagcgagagcgtggacgcttacggcatcagcttcatgaactggttccagcagaagcccggcaaggcccccaagctgctgatctacgccgccagcaatcagggcagcggcgtgccaagcagattttccggctctggcagcggcaccgacttcaccctgaccatcagcagcatgcagcccgaggacttcgccacctactactgccagcagagcaaggacgtgccctggacctttggccagggtaccaagctggaaatcaag

SEQ ID NO: 275 - protein, 161 aa, Artificial Sequence
  chemically synthesized
QGQSGQGDVNCAIWYSVCTTVPGGGSSGGAVGLLAPPGGLSGRSDNHGGSDIQLTQSPSSLSASVGDRVTITCRASESVDAYGISFMNWFQQKPGKAPKLLIYAASNQGSGVPSRFSGSGSGTDFTLTISSMQPEDFATYYCQQSKDVPWTFGQGTKLEIK

SEQ ID NO: 276 - DNA, 579 bp, Artificial Sequence
  chemically synthesized
caaggccagtctggccaaggtcaaggccagtctggccaaggtgatgttaattgcgctatttggtattcggtgtgcactactgttcctggaggtggctcgagcggcggctctatctcttccggactgctgtccggcagatccgacaatcacggcggaggatccggaggtggctcgagcggcggcgctgtgggactgctggctcctcctggtggcctgtctggcagatctgataaccacggaggatccgatatccagctgacccagagccctagcagcctgtctgccagcgtgggcgacagagtgaccatcacctgtagagccagcgagagcgtggacgcttacggcatcagcttcatgaactggttccagcagaagcccggcaaggcccccaagctgctgatctacgccgccagcaatcagggcagcggcgtgccaagcagattttccggctctggcagcggcaccgacttcaccctgaccatcagcagcatgcagcccgaggacttcgccacctactactgccagcagagcaaggacgtgccctggacctttggccagggtaccaagctggaaatcaag

SEQ ID NO: 277 - protein, 161 aa, Artificial Sequence
  chemically synthesized
QGQSGQGNWLDCQFYSECSVYGGGGSSGGAVGLLAPPGGLSGRSDNHGGSDIQLTQSPSSLSASVGDRVTITCRASESVDAYGISFMNWFQQKPGKAPKLLIYAASNQGSGVPSRFSGSGSGTDFTLTISSMQPEDFATYYCQQSKDVPWTFGQGTKLEIK

SEQ ID NO: 278 - DNA, 558 bp, Artificial Sequence
  chemically synthesized
caaggccagtctggccaaggtaattggttggattgccagttttattctgagtgctctgtttatggtggaggtggctcgagcggcggctctatctcttccggactgctgtccggcagatccgacaatcacggcggaggatccggaggtggctcgagcggcggcgctgtgggactgctggctcctcctggtggcctgtctggcagatctgataaccacggaggatccgatatccagctgacccagagccctagcagcctgtctgccagcgtgggcgacagagtgaccatcacctgtagagccagcgagagcgtggacgcttacggcatcagcttcatgaactggttccagcagaagcccggcaaggcccccaagctgctgatctacgccgccagcaatcagggcagcggcgtgccaagcagattttccggctctggcagcggcaccgacttcaccctgaccatcagcagcatgcagcccgaggacttcgccacctactactgccagcagagcaaggacgtgccctggacctttggccagggtaccaagctggaaatcaag

SEQ ID NO: 279 - protein, 161 aa, Artificial Sequence
  chemically synthesized
QGQSGQGVLCAAYALSSGICGGGGGSSGGAVGLLAPPGGLSGRSDNHGGSDIQLTQSPSSLSASVGDRVTITCRASESVDAYGISFMNWFQQKPGKAPKLLIYAASNQGSGVPSRFSGSGSGTDFTLTISSMQPEDFATYYCQQSKDVPWTFGQGTKLEIK

SEQ ID NO: 280 - DNA, 558 bp, Artificial Sequence
  chemically synthesized
caaggccagtctggccaaggtgttttgtgcgctgcttatgctttgagttcgggtatttgcggtgggggaggtggctcgagcggcggctctatctcttccggactgctgtccggcagatccgacaatcacggcggaggatccggaggtggctcgagcggcggcgctgtgggactgctggctcctcctggtggcctgtctggcagatctgataaccacggaggatccgatatccagctgacccagagccctagcagcctgtctgccagcgtgggcgacagagtgaccatcacctgtagagccagcgagagcgtggacgcttacggcatcagcttcatgaactggttccagcagaagcccggcaaggcccccaagctgctgatctacgccgccagcaatcagggcagcggcgtgccaagcagattttccggctctggcagcggcaccgacttcaccctgaccatcagcagcatgcagcccgaggacttcgccacctactactgccagcagagcaaggacgtgccctggacctttggccagggtaccaagctggaaatcaag

SEQ ID NO: 281 - protein, 158 aa, Artificial Sequence
  chemically synthesized
QGQSGQGSRCSVYEVSSGLCDWGGGSSGGSISSGLLSGRSDNHGGGSDIQLTQSPSSLSASVGDRVTITCRASESVDAYGISFMNWFQQKPGKAPKLLIYAASNQGSGVPSRFSGSGSGTDFTLTISSMQPEDFATYYCQQSKDVPWTFGQGTKLEIK

SEQ ID NO: 282 - DNA, 474 bp, Artificial Sequence
  chemically synthesized
caaggccagtctggccaaggttctcgttgctctgtgtatgaggtttcgtcggggctgtgcgattggggaggtggctcgagcggcggctctatctcttccggactgctgtccggcagatccgacaatcacggcggaggatccgatatccagctgacccagagccctagcagcctgtctgccagcgtgggcgacagagtgaccatcacctgtagagccagcgagagcgtggacgcttacggcatcagcttcatgaactggttccagcagaagcccggcaaggcccccaagctgctgatctacgccgccagcaatcagggcagcggcgtgccaagcagattttccggctctggcagcggcaccgacttcaccctgaccatcagcagcatgcagcccgaggacttcgccacctactactgccagcagagcaaggacgtgccctggacctttggccagggtaccaagctggaaatcaag

SEQ ID NO: 283 - protein, 158 aa, Artificial Sequence
  chemically synthesized
QGQSGQGGMCSAYAYSSKLCTIGGGSSGGSISSGLLSGRSDNHGGGSDIQLTQSPSSLSASVGDRVTITCRASESVDAYGISFMNWFQQKPGKAPKLLIYAASNQGSGVPSRFSGSGSGTDFTLTISSMQPEDFATYYCQQSKDVPWTFGQGTKLEIK

SEQ ID NO: 284 - DNA, 474 bp, Artificial Sequence
  chemically synthesized
caaggccagtctggccaaggtgggatgtgctcggcgtatgcttattcgagtaagttgtgcactattggaggtggctcgagcggcggctctatctcttccggactgctgtccggcagatccgacaatcacggcggaggatccgatatccagctgacccagagccctagcagcctgtctgccagcgtgggcgacagagtgaccatcacctgtagagccagcgagagcgtggacgcttacggcatcagcttcatgaactggttccagcagaagcccggcaaggcccccaagctgctgatctacgccgccagcaatcagggcagcggcgtgccaagcagattttccggctctggcagcggcaccgacttcaccctgaccatcagcagcatgcagcccgaggacttcgccacctactactgccagcagagcaaggacgtgccctggacctttggccagggtaccaagctggaaatcaag

SEQ ID NO: 285 - protein, 158 aa, Artificial Sequence
  chemically synthesized
QGQSGQGMTTNTCNLLCQQFLTGGGSSGGSISSGLLSGRSDNHGGGSDIQLTQSPSSLSASVGDRVTITCRASESVDAYGISFMNWFQQKPGKAPKLLIYAASNQGSGVPSRFSGSGSGTDFTLTISSMQPEDFATYYCQQSKDVPWTFGQGTKLEIK

SEQ ID NO: 286 - DNA, 474 bp, Artificial Sequence
  chemically synthesized
caaggccagtctggccaaggtatgactacgaatacttgcaatctgttgtgccagcagtttttgacgggaggtggctcgagcggcggctctatctcttccggactgctgtccggcagatccgacaatcacggcggaggatccgatatccagctgacccagagccctagcagcctgtctgccagcgtgggcgacagagtgaccatcacctgtagagccagcgagagcgtggacgcttacggcatcagcttcatgaactggttccagcagaagcccggcaaggcccccaagctgctgatctacgccgccagcaatcagggcagcggcgtgccaagcagattttccggctctggcagcggcaccgacttcaccctgaccatcagcagcatgcagcccgaggacttcgccacctactactgccagcagagcaaggacgtgccctggacctttggccagggtaccaagctggaaatcaag

SEQ ID NO: 287 - protein, 158 aa, Artificial Sequence
  chemically synthesized
QGQSGQGFQPCLMFASSCFTSKGGGSSGGSISSGLLSGRSDNHGGGSDIQLTQSPSSLSASVGDRVTITCRASESVDAYGISFMNWFQQKPGKAPKLLIYAASNQGSGVPSRFSGSGSGTDFTLTISSMQPEDFATYYCQQSKDVPWTFGQGTKLEIK

SEQ ID NO: 288 - DNA, 474 bp, Artificial Sequence
  chemically synthesized
caaggccagtctggccaaggttttcagccgtgcctgatgtttgcgagtagttgctttactagtaagggaggtggctcgagcggcggctctatctcttccggactgctgtccggcagatccgacaatcacggcggaggatccgatatccagctgacccagagccctagcagcctgtctgccagcgtgggcgacagagtgaccatcacctgtagagccagcgagagcgtggacgcttacggcatcagcttcatgaactggttccagcagaagcccggcaaggcccccaagctgctgatctacgccgccagcaatcagggcagcggcgtgccaagcagattttccggctctggcagcggcaccgacttcaccctgaccatcagcagcatgcagcccgaggacttcgccacctactactgccagcagagcaaggacgtgccctggacctttggccagggtaccaagctggaaatcaag

SEQ ID NO: 289 - protein, 158 aa, Artificial Sequence
  chemically synthesized
QGQSGQGALCSMYLASSGLCNKGGGSSGGSISSGLLSGRSDNHGGGSDIQLTQSPSSLSASVGDRVTITCRASESVDAYGISFMNWFQQKPGKAPKLLIYAASNQGSGVPSRFSGSGSGTDFTLTISSMQPEDFATYYCQQSKDVPWTFGQGTKLEIK

SEQ ID NO: 290 - DNA, 474 bp, Artificial Sequence
  chemically synthesized
caaggccagtctggccaaggtgcgctttgcagtatgtatcttgctagttctgggctgtgcaataagggaggtggctcgagcggcggctctatctcttccggactgctgtccggcagatccgacaatcacggcggaggatccgatatccagctgacccagagccctagcagcctgtctgccagcgtgggcgacagagtgaccatcacctgtagagccagcgagagcgtggacgcttacggcatcagcttcatgaactggttccagcagaagcccggcaaggcccccaagctgctgatctacgccgccagcaatcagggcagcggcgtgccaagcagattttccggctctggcagcggcaccgacttcaccctgaccatcagcagcatgcagcccgaggacttcgccacctactactgccagcagagcaaggacgtgccctggacctttggccagggtaccaagctggaaatcaag

SEQ ID NO: 291 - protein, 158 aa, Artificial Sequence
  chemically synthesized
QGQSGQGEFCARDWLPYQCSSFGGGSSGGSISSGLLSGRSDNHGGGSDIQLTQSPSSLSASVGDRVTITCRASESVDAYGISFMNWFQQKPGKAPKLLIYAASNQGSGVPSRFSGSGSGTDFTLTISSMQPEDFATYYCQQSKDVPWTFGQGTKLEIK

SEQ ID NO: 292 - DNA, 474 bp, Artificial Sequence
  chemically synthesized
caaggccagtctggccaaggtgagttttgcgctcgggattggctgccgtatcagtgctcgagttttggaggtggctcgagcggcggctctatctcttccggactgctgtccggcagatccgacaatcacggcggaggatccgatatccagctgacccagagccctagcagcctgtctgccagcgtgggcgacagagtgaccatcacctgtagagccagcgagagcgtggacgcttacggcatcagcttcatgaactggttccagcagaagcccggcaaggcccccaagctgctgatctacgccgccagcaatcagggcagcggcgtgccaagcagattttccggctctggcagcggcaccgacttcaccctgaccatcagcagcatgcagcccgaggacttcgccacctactactgccagcagagcaaggacgtgccctggacctttggccagggtaccaagctggaaatcaag

SEQ ID NO: 293 - protein, 158 aa, Artificial Sequence
  chemically synthesized
QGQSGQGPYICSSFPLDCQAGQGGGSSGGSISSGLLSGRSDNHGGGSDIQLTQSPSSLSASVGDRVTITCRASESVDAYGISFMNWFQQKPGKAPKLLIYAASNQGSGVPSRFSGSGSGTDFTLTISSMQPEDFATYYCQQSKDVPWTFGQGTKLEIK

SEQ ID NO: 294 - protein, 8 aa, Artificial Sequence
  chemically synthesized
LSGRSDNH

SEQ ID NO: 295 - protein, 8 aa, Artificial Sequence
  chemically synthesized
TGRGPSWV

SEQ ID NO: 296 - protein, 8 aa, Artificial Sequence
  chemically synthesized
PLTGRSGG

SEQ ID NO: 297 - protein, 8 aa, Artificial Sequence
  chemically synthesized
TARGPSFK

SEQ ID NO: 298 - protein, 12 aa, Artificial Sequence
  chemically synthesized
NTLSGRSENHSG

SEQ ID NO: 299 - protein, 12 aa, Artificial Sequence
  chemically synthesized
NTLSGRSGNHGS

SEQ ID NO: 300 - protein, 12 aa, Artificial Sequence
  chemically synthesized
TSTSGRSANPRG

SEQ ID NO: 301 - protein, 8 aa, Artificial Sequence
  chemically synthesized
TSGRSANP

SEQ ID NO: 302 - protein, 10 aa, Artificial Sequence
  chemically synthesized
VHMPLGFLGP

SEQ ID NO: 303 - protein, 8 aa, Artificial Sequence
  chemically synthesized
AVGLLAPP

SEQ ID NO: 304 - protein, 8 aa, Artificial Sequence
  chemically synthesized
AQNLLGMV

SEQ ID NO: 305 - protein, 8 aa, Artificial Sequence
  chemically synthesized
QNQALRMA

SEQ ID NO: 306 - protein, 8 aa, Artificial Sequence
  chemically synthesized
LAAPLGLL

SEQ ID NO: 307 - protein, 8 aa, Artificial Sequence
  chemically synthesized
STFPFGMF

SEQ ID NO: 308 - protein, 8 aa, Artificial Sequence
  chemically synthesized
ISSGLLSS

SEQ ID NO: 309 - protein, 8 aa, Artificial Sequence
  chemically synthesized
PAGLWLDP

SEQ ID NO: 310 - protein, 8 aa, Artificial Sequence
  chemically synthesized
VAGRSMRP

SEQ ID NO: 311 - protein, 8 aa, Artificial Sequence
  chemically synthesized
VVPEGRRS

SEQ ID NO: 312 - protein, 8 aa, Artificial Sequence
  chemically synthesized
ILPRSPAF

SEQ ID NO: 313 - protein, 8 aa, Artificial Sequence
  chemically synthesized
MVLGRSLL

SEQ ID NO: 314 - protein, 8 aa, Artificial Sequence
  chemically synthesized
QGRAITFI

SEQ ID NO: 315 - protein, 8 aa, Artificial Sequence
  chemically synthesized
SPRSIMLA

SEQ ID NO: 316 - protein, 8 aa, Artificial Sequence
  chemically synthesized
SMLRSMPL

SEQ ID NO: 317 - protein, 16 aa, Artificial Sequence
  chemically synthesized
VIWAGGSTNYNSALMS

SEQ ID NO: 318 - protein, 18 aa, Artificial Sequence
  chemically synthesized
AVGLLAPPGGLSGRSDNH

SEQ ID NO: 319 - protein, 8 aa, Artificial Sequence
  chemically synthesized
SARGPSRW

SEQ ID NO: 320 - protein, 8 aa, Artificial Sequence
  chemically synthesized
GGWHTGRN

SEQ ID NO: 321 - protein, 8 aa, Artificial Sequence
  chemically synthesized
HTGRSGAL

SEQ ID NO: 322 - protein, 8 aa, Artificial Sequence
  chemically synthesized
AARGPAIH

SEQ ID NO: 323 - protein, 8 aa, Artificial Sequence
  chemically synthesized
RGPAFNPM

SEQ ID NO: 324 - protein, 8 aa, Artificial Sequence
  chemically synthesized
SSRGPAYL

SEQ ID NO: 325 - protein, 8 aa, Artificial Sequence
  chemically synthesized
RGPATPIM

SEQ ID NO: 326 - protein, 4 aa, Artificial Sequence
  chemically synthesized
RGPA

SEQ ID NO: 327 - protein, 10 aa, Artificial Sequence
  chemically synthesized
GGQPSGMWGW

SEQ ID NO: 328 - protein, 10 aa, Artificial Sequence
  chemically synthesized
FPRPLGITGL

SEQ ID NO: 329 - protein, 8 aa, Artificial Sequence
  chemically synthesized
SPLTGRSG

SEQ ID NO: 330 - protein, 8 aa, Artificial Sequence
  chemically synthesized
SAGFSLPA

SEQ ID NO: 331 - protein, 9 aa, Artificial Sequence
  chemically synthesized
LAPLGLQRR

SEQ ID NO: 332 - protein, 8 aa, Artificial Sequence
  chemically synthesized
SGGPLGVR

SEQ ID NO: 333 - protein, 4 aa, Artificial Sequence
  chemically synthesized
PLGL

SEQ ID NO: 334 - protein, 7 aa, Artificial Sequence
  chemically synthesized
ISSGLSS

SEQ ID NO: 335 - protein, 8 aa, Artificial Sequence
  chemically synthesized
PVGYTSSL

SEQ ID NO: 336 - protein, 8 aa, Artificial Sequence
  chemically synthesized
DWLYWPGI

SEQ ID NO: 337 - protein, 8 aa, Artificial Sequence
  chemically synthesized
LKAAPRWA

SEQ ID NO: 338 - protein, 8 aa, Artificial Sequence
  chemically synthesized
GPSHLVLT

SEQ ID NO: 339 - protein, 8 aa, Artificial Sequence
  chemically synthesized
LPGGLSPW

SEQ ID NO: 340 - protein, 8 aa, Artificial Sequence
  chemically synthesized
MGLFSEAG

SEQ ID NO: 341 - protein, 8 aa, Artificial Sequence
  chemically synthesized
SPLPLRVP

SEQ ID NO: 342 - protein, 8 aa, Artificial Sequence
  chemically synthesized
RMHLRSLG

SEQ ID NO: 343 - protein, 8 aa, Artificial Sequence
  chemically synthesized
LLAPSHRA

SEQ ID NO: 344 - protein, 7 aa, Artificial Sequence
  chemically synthesized
GPRSFGL

SEQ ID NO: 345 - protein, 6 aa, Artificial Sequence
  chemically synthesized
GPRSFG

SEQ ID NO: 346 - protein, 22 aa, Artificial Sequence
  chemically synthesized
ISSGLLSSGGSGGSLSGRSDNH

SEQ ID NO: 347 - protein, 22 aa, Artificial Sequence
  chemically synthesized
AVGLLAPPGGTSTSGRSANPRG

SEQ ID NO: 348 - protein, 22 aa, Artificial Sequence
  chemically synthesized
TSTSGRSANPRGGGAVGLLAPP

SEQ ID NO: 349 - protein, 24 aa, Artificial Sequence
  chemically synthesized
VHMPLGFLGPGGTSTSGRSANPRG

SEQ ID NO: 350 - protein, 24 aa, Artificial Sequence
  chemically synthesized
TSTSGRSANPRGGGVHMPLGFLGP

SEQ ID NO: 351 - protein, 18 aa, Artificial Sequence
  chemically synthesized
LSGRSDNHGGAVGLLAPP

SEQ ID NO: 352 - protein, 20 aa, Artificial Sequence
  chemically synthesized
VHMPLGFLGPGGLSGRSDNH

SEQ ID NO: 353 - protein, 20 aa, Artificial Sequence
  chemically synthesized
LSGRSDNHGGVHMPLGFLGP

SEQ ID NO: 354 - protein, 22 aa, Artificial Sequence
  chemically synthesized
LSGRSDNHGGSGGSISSGLLSS

SEQ ID NO: 355 - protein, 22 aa, Artificial Sequence
  chemically synthesized
LSGRSGNHGGSGGSISSGLLSS

SEQ ID NO: 356 - protein, 22 aa, Artificial Sequence
  chemically synthesized
ISSGLLSSGGSGGSLSGRSGNH

SEQ ID NO: 357 - protein, 22 aa, Artificial Sequence
  chemically synthesized
LSGRSDNHGGSGGSQNQALRMA

SEQ ID NO: 358 - protein, 22 aa, Artificial Sequence
  chemically synthesized
QNQALRMAGGSGGSLSGRSDNH

SEQ ID NO: 359 - protein, 22 aa, Artificial Sequence
  chemically synthesized
LSGRSGNHGGSGGSQNQALRMA

SEQ ID NO: 360 - protein, 22 aa, Artificial Sequence
  chemically synthesized
QNQALRMAGGSGGSLSGRSGNH

SEQ ID NO: 361 - protein, 13 aa, Artificial Sequence
  chemically synthesized
ISSGLLSGRSGNH

SEQ ID NO: 362 - protein, 7 aa, Artificial Sequence
  chemically synthesized
QGQSGQG

SEQ ID NO: 363 - protein, 5 aa, Artificial Sequence
  chemically synthesized
GSGGS

SEQ ID NO: 364 - protein, 4 aa, Artificial Sequence
  chemically synthesized
GGGS

SEQ ID NO: 365 - protein, 4 aa, Artificial Sequence
  chemically synthesized
GGSG

SEQ ID NO: 366 - protein, 5 aa, Artificial Sequence
  chemically synthesized
GGSGG

SEQ ID NO: 367 - protein, 5 aa, Artificial Sequence
  chemically synthesized
GSGSG

SEQ ID NO: 368 - protein, 5 aa, Artificial Sequence
  chemically synthesized
GSGGG

SEQ ID NO: 369 - protein, 5 aa, Artificial Sequence
  chemically synthesized
GGGSG

SEQ ID NO: 370 - protein, 5 aa, Artificial Sequence
  chemically synthesized
GSSSG

SEQ ID NO: 371 - protein, 13 aa, Artificial Sequence
  chemically synthesized
GSSGGSGGSGGSG

SEQ ID NO: 372 - protein, 11 aa, Artificial Sequence
  chemically synthesized
GSSGGSGGSGG

SEQ ID NO: 373 - protein, 12 aa, Artificial Sequence
  chemically synthesized
GSSGGSGGSGGS

SEQ ID NO: 374 - protein, 16 aa, Artificial Sequence
  chemically synthesized
GSSGGSGGSGGSGGGS

SEQ ID NO: 375 - protein, 10 aa, Artificial Sequence
  chemically synthesized
GSSGGSGGSG

SEQ ID NO: 376 - protein, 11 aa, Artificial Sequence
  chemically synthesized
GSSGGSGGSGS

SEQ ID NO: 377 - protein, 4 aa, Artificial Sequence
  chemically synthesized
GGGS

SEQ ID NO: 378 - protein, 5 aa, Artificial Sequence
  chemically synthesized
GSSGT

SEQ ID NO: 379 - protein, 4 aa, Artificial Sequence
  chemically synthesized
GSSG

SEQ ID NO: 380 - protein, 243 aa, Artificial Sequence
  chemically synthesized
  MISC_FEATURE (16)..(16): X is a linking peptide or absent
  MISC_FEATURE (25)..(25): X is a linking peptide or absent
AMSGCSWSAFCPYLAXLSGRSDNHXDIQLTQSPSSLSASVGDRVTITCRASESVDNYGISFMNWFQQKPGKAPKLLIYAASNQGSGVPSRFSGSGSGTDFTLTISSMQPEDFATYYCQQSKDVPWTFGQGTKLEIKRTVAAPSVFIFPPSDEQLKSGTASVVCLLNNFYPREAKVQWKVDNALQSGNSQESVTEQDSKDSTYSLSSTLTLSKADYEKHKVYACEVTHQGLSSPVTKSFNRGEC

SEQ ID NO: 381 - protein, 329 aa, Artificial Sequence
  chemically synthesized
ASTKGPSVFPLAPSSKSTSGGTAALGCLVKDYFPEPVTVSWNSGALTSGVHTFPAVLQSSGLYSLSSVVTVPSSSLGTQTYICNVNHKPSNTKVDKKVEPKSCDKTHTCPPCPAPELLGGPSVFLFPPKPKDTLMISRTPEVTCVVVDVSHEDPEVKFNWYVDGVEVHNAKTKPREEQYNSTYRVVSVLTVLHQDWLNGKEYKCKVSNKALPAPIEKTISKAKGQPREPQVYTLPPSREEMTKNQVSLTCLVKGFYPSDIAVEWESNGQPENNYKTTPPVLDSDGSFFLYSKLTVDKSRWQQGNVFSCSVMHEALHNHYTQKSLSLSPG

SEQ ID NO: 382 - protein, 329 aa, Artificial Sequence
  chemically synthesized
ASTKGPSVFPLAPSSKSTSGGTAALGCLVKDYFPEPVTVSWNSGALTSGVHTFPAVLQSSGLYSLSSVVTVPSSSLGTQTYICNVNHKPSNTKVDKKVEPKSCDKTHTCPPCPAPELLGGPSVFLFPPKPKDTLMISRTPEVTCVVVDVSHEDPEVKFNWYVDGVEVHNAKTKPREEQYASTYRVVSVLTVLHQDWLNGKEYKCKVSNKALPAPIEKTISKAKGQPREPQVYTLPPSREEMTKNQVSLTCLVKGFYPSDIAVEWESNGQPENNYKTTPPVLDSDGSFFLYSKLTVDKSRWQQGNVFSCSVMHEALHNHYTQKSLSLSPG

SEQ ID NO: 383 - protein, 326 aa, Artificial Sequence
  chemically synthesized
ASTKGPSVFPLAPCSRSTSESTAALGCLVKDYFPEPVTVSWNSGALTSGVHTFPAVLQSSGLYSLSSVVTVPSSSLGTKTYTCNVDHKPSNTKVDKRVESKYGPPCPPCPAPEFLGGPSVFLFPPKPKDTLMISRTPEVTCVVVDVSQEDPEVQFNWYVDGVEVHNAKTKPREEQFNSTYRVVSVLTVLHQDWLNGKEYKCKVSNKGLPSSIEKTISKAKGQPREPQVYTLPPSQEEMTKNQVSLTCLVKGFYPSDIAVEWESNGQPENNYKTTPPVLDSDGSFFLYSRLTVDKSRWQEGNVFSCSVMHEALHNHYTQKSLSLSLG

SEQ ID NO: 384 - protein, 15 aa, Artificial Sequence
  chemically synthesized
DYTYCRWVNWCLSGV

SEQ ID NO: 385 - protein, 15 aa, Artificial Sequence
  chemically synthesized
ILCPEDPWGHKCKLP

SEQ ID NO: 386 - protein, 15 aa, Artificial Sequence
  chemically synthesized
TNIWSCQTYCDHKHK

SEQ ID NO: 387 - protein, 15 aa, Artificial Sequence
  chemically synthesized
SDHKCKLQNCMNTKV

SEQ ID NO: 388 - protein, 15 aa, Artificial Sequence
  chemically synthesized
PGNCHPMQKEMCQFI

SEQ ID NO: 389 - protein, 15 aa, Artificial Sequence
  chemically synthesized
VEHLCYTHNKCKHPD

SEQ ID NO: 390 - protein, 15 aa, Artificial Sequence
  chemically synthesized
TIPRCGQHPKCKDTL

SEQ ID NO: 391 - protein, 15 aa, Artificial Sequence
  chemically synthesized
ACRICQDHPKTKWNS

SEQ ID NO: 392 - protein, 15 aa, Artificial Sequence
  chemically synthesized
LIQCTGNLDHKCKHY

SEQ ID NO: 393 - protein, 15 aa, Artificial Sequence
  chemically synthesized
IPCHHSADHKHKCTS

SEQ ID NO: 394 - protein, 15 aa, Artificial Sequence
  chemically synthesized
SRQICADYNCHNKYK

SEQ ID NO: 395 - protein, 15 aa, Artificial Sequence
  chemically synthesized
QPCNPQIDHKIKCIY

SEQ ID NO: 396 - protein, 15 aa, Artificial Sequence
  chemically synthesized
HYTICMTHNKCKDMA

SEQ ID NO: 397 - protein, 15 aa, Artificial Sequence
  chemically synthesized
ANSCLAVEHKCKHNY

SEQ ID NO: 398 - protein, 15 aa, Artificial Sequence
  chemically synthesized
AALHCTEHKCKNHIK

SEQ ID NO: 399 - protein, 15 aa, Artificial Sequence
  chemically synthesized
APCIINTVDWKSCEI

SEQ ID NO: 400 - protein, 15 aa, Artificial Sequence
  chemically synthesized
ATNWCTHKQKCKQDM

SEQ ID NO: 401 - protein, 15 aa, Artificial Sequence
  chemically synthesized
DCYNEHKLKTRVCNN

SEQ ID NO: 402 - protein, 15 aa, Artificial Sequence
  chemically synthesized
DEMQCSHKQKCTNSK

SEQ ID NO: 403 - protein, 15 aa, Artificial Sequence
  chemically synthesized
DVGICSQHNKCKPTK

SEQ ID NO: 404 - protein, 15 aa, Artificial Sequence
  chemically synthesized
EKYCSSDDHKCKITL

SEQ ID NO: 405 - protein, 15 aa, Artificial Sequence
  chemically synthesized
ELECSHNKVKNCIQI

SEQ ID NO: 406 - protein, 15 aa, Artificial Sequence
  chemically synthesized
ELHPCNTHKCKPIVN

SEQ ID NO: 407 - protein, 15 aa, Artificial Sequence
  chemically synthesized
EVGSCNHPKCKSNNY

SEQ ID NO: 408 - protein, 15 aa, Artificial Sequence
  chemically synthesized
EYSPSLAHPKLKDNA

SEQ ID NO: 409 - protein, 15 aa, Artificial Sequence
  chemically synthesized
FESLHPKGKHPEDLG

SEQ ID NO: 410 - protein, 15 aa, Artificial Sequence
  chemically synthesized
FPLCVRADRVCGDAQ

SEQ ID NO: 411 - protein, 15 aa, Artificial Sequence
  chemically synthesized
FQAPPASHNKLKPSL

SEQ ID NO: 412 - protein, 15 aa, Artificial Sequence
  chemically synthesized
GAIDSCHHKCKSPHY

SEQ ID NO: 413 - protein, 15 aa, Artificial Sequence
  chemically synthesized
GKIYTCEHNCTFGYS

SEQ ID NO: 414 - protein, 15 aa, Artificial Sequence
  chemically synthesized
HCTVNNHSSDHKCKI

SEQ ID NO: 415 - protein, 15 aa, Artificial Sequence
  chemically synthesized
HGTQCTHNKCKPILS

SEQ ID NO: 416 - protein, 15 aa, Artificial Sequence
  chemically synthesized
HIGWCLHPKCKTTTT

SEQ ID NO: 417 - protein, 15 aa, Artificial Sequence
  chemically synthesized
HLRTCIQKWCEHKMK

SEQ ID NO: 418 - protein, 15 aa, Artificial Sequence
  chemically synthesized
HTDCTMMSNHKCKIN

SEQ ID NO: 419 - protein, 15 aa, Artificial Sequence
  chemically synthesized
IRQQCTALACLLKVH

SEQ ID NO: 420 - protein, 15 aa, Artificial Sequence
  chemically synthesized
KGCSTHKMRAYCNQM

SEQ ID NO: 421 - protein, 15 aa, Artificial Sequence
  chemically synthesized
KMFTPCKIWCNNSYN

SEQ ID NO: 422 - protein, 15 aa, Artificial Sequence
  chemically synthesized
KTMCSGHKQKCNNSS

SEQ ID NO: 423 - protein, 15 aa, Artificial Sequence
  chemically synthesized
LACHSASLVDHKCKL

SEQ ID NO: 424 - protein, 15 aa, Artificial Sequence
  chemically synthesized
LCNVSMDHKHKPCYL

SEQ ID NO: 425 - protein, 15 aa, Artificial Sequence
  chemically synthesized
LGLNCFSEHKCKEHM

SEQ ID NO: 426 - protein, 15 aa, Artificial Sequence
  chemically synthesized
LGTCTHKHKNCNYTL

SEQ ID NO: 427 - protein, 15 aa, Artificial Sequence
  chemically synthesized
LHEGCTTHNKCKPIA

SEQ ID NO: 428 - protein, 15 aa, Artificial Sequence
  chemically synthesized
LKRSCTGHWTCYTNW

SEQ ID NO: 429 - protein, 15 aa, Artificial Sequence
  chemically synthesized
LQRCTHKEKYCHAIH

SEQ ID NO: 430 - protein, 15 aa, Artificial Sequence
  chemically synthesized
LSHCYDHKRKCSYIV

SEQ ID NO: 431 - protein, 15 aa, Artificial Sequence
  chemically synthesized
LSKCHNKEKNCSNNN

SEQ ID NO: 432 - protein, 15 aa, Artificial Sequence
  chemically synthesized
MDTCEMHKQKCRPSF

SEQ ID NO: 433 - protein, 15 aa, Artificial Sequence
  chemically synthesized
MHNECLTHKCKVPIT

SEQ ID NO: 434 - protein, 15 aa, Artificial Sequence
  chemically synthesized
MLTLCNTNACHKEKN

SEQ ID NO: 435 - protein, 15 aa, Artificial Sequence
  chemically synthesized
MRPCLNNLEHKCKHY

SEQ ID NO: 436 - protein, 15 aa, Artificial Sequence
  chemically synthesized
MSRCPTHKMKCSLNI

SEQ ID NO: 437 - protein, 15 aa, Artificial Sequence
  chemically synthesized
MWICQEHKLKCMTDT

SEQ ID NO: 438 - protein, 15 aa, Artificial Sequence
  chemically synthesized
MYYCKRRSAFYCTLN

SEQ ID NO: 439 - protein, 15 aa, Artificial Sequence
  chemically synthesized
NDCQHDKQMHKCKMH

SEQ ID NO: 440 - protein, 15 aa, Artificial Sequence
  chemically synthesized
NFGPCPMLLGCFGFR

SEQ ID NO: 441 - protein, 15 aa, Artificial Sequence
  chemically synthesized
NHTDCSHPKCKSHDS

SEQ ID NO: 442 - protein, 15 aa, Artificial Sequence
  chemically synthesized
NLNCPHKQKNCDKYH

SEQ ID NO: 443 - protein, 15 aa, Artificial Sequence
  chemically synthesized
NPQCTPIDHKCKTHH

SEQ ID NO: 444 - protein, 15 aa, Artificial Sequence
  chemically synthesized
NTTSCTHPKCKHQGK

SEQ ID NO: 445 - protein, 15 aa, Artificial Sequence
  chemically synthesized
NVGGCDNYGCHKLKN

SEQ ID NO: 446 - protein, 15 aa, Artificial Sequence
  chemically synthesized
PCSPGNLTWDHKCKY

SEQ ID NO: 447 - protein, 15 aa, Artificial Sequence
  chemically synthesized
PFTKCHGFNKCKEHT

SEQ ID NO: 448 - protein, 15 aa, Artificial Sequence
  chemically synthesized
PGDKCTHKEKCYYNN

SEQ ID NO: 449 - protein, 15 aa, Artificial Sequence
  chemically synthesized
PNICNLDHKRKCRIN

SEQ ID NO: 450 - protein, 15 aa, Artificial Sequence
  chemically synthesized
PQLACKHPKCKDAGN

SEQ ID NO: 451 - protein, 15 aa, Artificial Sequence
  chemically synthesized
PSCTMWTHGGVCKHA

SEQ ID NO: 452 - protein, 15 aa, Artificial Sequence
  chemically synthesized
PSHRHPLAKPGFRVE

SEQ ID NO: 453 - protein, 15 aa, Artificial Sequence
  chemically synthesized
PTCFKTHNKSKCNRV

SEQ ID NO: 454 - protein, 15 aa, Artificial Sequence
  chemically synthesized
PTPVCHHNFHCFGYD

SEQ ID NO: 455 - protein, 15 aa, Artificial Sequence
  chemically synthesized
QATCQWKKRSKCHNK

SEQ ID NO: 456 - protein, 15 aa, Artificial Sequence
  chemically synthesized
QHSWCQHKAKCNYGN

SEQ ID NO: 457 - protein, 15 aa, Artificial Sequence
  chemically synthesized
QNCSPTYTTHKCKLT

SEQ ID NO: 458 - protein, 15 aa, Artificial Sequence
  chemically synthesized
QSSNCEHKRKCSSIS

SEQ ID NO: 459 - protein, 15 aa, Artificial Sequence
  chemically synthesized
RPCLLGLVPDHKCKL

SEQ ID NO: 460 - protein, 15 aa, Artificial Sequence
  chemically synthesized
RRSCMRSINTCKQKY

SEQ ID NO: 461 - protein, 15 aa, Artificial Sequence
  chemically synthesized
RSSCPTVTPQNCENQ

SEQ ID NO: 462 - protein, 15 aa, Artificial Sequence
  chemically synthesized
RTMCLDLNHKCKPSN

SEQ ID NO: 463 - protein, 15 aa, Artificial Sequence
  chemically synthesized
RTYWCTNHNKCKHNM

SEQ ID NO: 464 - protein, 15 aa, Artificial Sequence
  chemically synthesized
RVENCEHNQYCHKWK

SEQ ID NO: 465 - protein, 15 aa, Artificial Sequence
  chemically synthesized
SCHEDDHKNKNICSL

SEQ ID NO: 466 - protein, 15 aa, Artificial Sequence
  chemically synthesized
SDTCVMNHPKCKRDN

SEQ ID NO: 467 - protein, 15 aa, Artificial Sequence
  chemically synthesized
SSTCFHPNQKECMTK

SEQ ID NO: 468 - protein, 15 aa, Artificial Sequence
  chemically synthesized
SSYCGGITMRCRRAM

SEQ ID NO: 469 - protein, 15 aa, Artificial Sequence
  chemically synthesized
STGYCTYVNWCNYTN

SEQ ID NO: 470 - protein, 15 aa, Artificial Sequence
  chemically synthesized
THKCKLHLQVCTQTT

SEQ ID NO: 471 - protein, 15 aa, Artificial Sequence
  chemically synthesized
TMNCTHPKQKCQHTN

SEQ ID NO: 472 - protein, 15 aa, Artificial Sequence
  chemically synthesized
TNVLCESHNCDHKNK

SEQ ID NO: 473 - protein, 15 aa, Artificial Sequence
  chemically synthesized
TQHAASLGVEHKSKI

SEQ ID NO: 474 - protein, 15 aa, Artificial Sequence
  chemically synthesized
TQLPCFDDHKCKNTN

SEQ ID NO: 475 - protein, 15 aa, Artificial Sequence
  chemically synthesized
TSDSCMRQKCEHKEK

SEQ ID NO: 476 - protein, 15 aa, Artificial Sequence
  chemically synthesized
TTCDDHKYKHKCAQL

SEQ ID NO: 477 - protein, 15 aa, Artificial Sequence
  chemically synthesized
TTCGAHKEKQHCIYT

SEQ ID NO: 478 - protein, 15 aa, Artificial Sequence
  chemically synthesized
TTYCAYWHNKCKFET

SEQ ID NO: 479 - protein, 15 aa, Artificial Sequence
  chemically synthesized
VGPTCGHAKCKQSEV

SEQ ID NO: 480 - protein, 15 aa, Artificial Sequence
  chemically synthesized
VSHPCNTHKCKTNIV

SEQ ID NO: 481 - protein, 15 aa, Artificial Sequence
  chemically synthesized
WDCRNTSHPKLKCHN

SEQ ID NO: 482 - protein, 15 aa, Artificial Sequence
  chemically synthesized
WSPCNSDHKRKCNNG

SEQ ID NO: 483 - protein, 15 aa, Artificial Sequence
  chemically synthesized
YANMSCEYDCHKMKY

SEQ ID NO: 484 - protein, 15 aa, Artificial Sequence
  chemically synthesized
YANPCTHKEKCHFKN

SEQ ID NO: 485 - protein, 15 aa, Artificial Sequence
  chemically synthesized
YDCSPSWTHPKCKHK

SEQ ID NO: 486 - protein, 15 aa, Artificial Sequence
  chemically synthesized
YGWTCTTHPKCKTTN

SEQ ID NO: 487 - protein, 15 aa, Artificial Sequence
  chemically synthesized
YQKCHPKAKDCGNNT

SEQ ID NO: 488 - protein, 15 aa, Artificial Sequence
  chemically synthesized
YWECPNMEHNKCKNN

SEQ ID NO: 489 - protein, 15 aa, Artificial Sequence
  chemically synthesized
PMGNRYCVLDHPKLK

SEQ ID NO: 490 - protein, 15 aa, Artificial Sequence
  chemically synthesized
GHKSCCQKHCEYTQT

SEQ ID NO: 491 - protein, 15 aa, Artificial Sequence
  chemically synthesized
LYLEMCSCCCWESIT

SEQ ID NO: 492 - protein, 15 aa, Artificial Sequence
  chemically synthesized
ACQAQHCYKTYACKP

SEQ ID NO: 493 - protein, 15 aa, Artificial Sequence
  chemically synthesized
CCYTCSVHPKCKNQL

SEQ ID NO: 494 - protein, 15 aa, Artificial Sequence
  chemically synthesized
CKHRCSHKEKCPANH

SEQ ID NO: 495 - protein, 15 aa, Artificial Sequence
  chemically synthesized
CHVLFCLMQCCRWSL

SEQ ID NO: 496 - protein, 15 aa, Artificial Sequence
  chemically synthesized
LNSSLVFDHPKAKPN

SEQ ID NO: 497 - protein, 15 aa, Artificial Sequence
  chemically synthesized
MCLLCRSKFGCKVKG

SEQ ID NO: 498 - protein, 15 aa, Artificial Sequence
  chemically synthesized
IICNDHKCKQNQCNN

SEQ ID NO: 499 - protein, 15 aa, Artificial Sequence
  chemically synthesized
IRCSLRDSLCGCERM

SEQ ID NO: 500 - protein, 15 aa, Artificial Sequence
  chemically synthesized
TSCQPPKHKCTCNHG

SEQ ID NO: 501 - protein, 15 aa, Artificial Sequence
  chemically synthesized
TQCPHRCVKPNCWLH

SEQ ID NO: 502 - protein, 15 aa, Artificial Sequence
  chemically synthesized
KCCETKRNHKHCTYK

SEQ ID NO: 503 - protein, 15 aa, Artificial Sequence
  chemically synthesized
LPHCCHKAKHCNHTS

SEQ ID NO: 504 - protein, 15 aa, Artificial Sequence
  chemically synthesized
PAMCAAIHEKCCIKV

SEQ ID NO: 505 - protein, 15 aa, Artificial Sequence
  chemically synthesized
PRSCGNQLCPCHYYK

SEQ ID NO: 506 - protein, 15 aa, Artificial Sequence
  chemically synthesized
TNKCSCNHNMKCINY

SEQ ID NO: 507 - protein, 15 aa, Artificial Sequence
  chemically synthesized
VETCCQHNKCKYPFI

SEQ ID NO: 508 - protein, 15 aa, Artificial Sequence
  chemically synthesized
IFCCSNHEDHKCKTN

SEQ ID NO: 509 - protein, 15 aa, Artificial Sequence
  chemically synthesized
VCRLICPLTCVIGVG

SEQ ID NO: 510 - protein, 15 aa, Artificial Sequence
  chemically synthesized
FHGCCSVYSCLTNPG

SEQ ID NO: 511 - protein, 15 aa, Artificial Sequence
  chemically synthesized
ALACHPKQKPLEGQL

SEQ ID NO: 512 - protein, 15 aa, Artificial Sequence
  chemically synthesized
SIICCATSSCPLKHL

SEQ ID NO: 513 - protein, 15 aa, Artificial Sequence
  chemically synthesized
APCCRPHKEKPIDSR

SEQ ID NO: 514 - protein, 15 aa, Artificial Sequence
  chemically synthesized
WELCCPSADCRVAMG

SEQ ID NO: 515 - protein, 156 aa, Artificial Sequence
  chemically synthesized
QGQSGQGDYTYCRWVNWCLSGVGGGSSGGSISSGLLSGRSDNHGGGSYELTQPPSASVNVGETVKITCSGDQLPKYFADWFHQRSDQTILQVIYDDNKRPSGIPERISGSSSGTTATLTIRDVRAEDEGDYYCFSGYVDSDSKLYVFGSGTQLTVL

SEQ ID NO: 516 - DNA, 467 bp, Artificial Sequence
  chemically synthesized
caaggccagtctggccaaggtgattatacgtattgccgttgggttaattggtgcttgtctggggtgggaggtggctcgagcggcggctctatctcttccggactgctgtccggcagatccgacaatcacggcggaggctcttatgagctgactcagccaccttcagcatcagtcaatgtaggagagactgtcaaaatcacctgctctggggaccaattgccgaaatattttgcagattggtttcatcaaaggtcagaccagaccattttgcaagtgatatatgatgataataagcgcccctcgggtatccctgaaagaatctctgggtccagctcagggacaacagccaccttgaccatcagagatgtccgggctgaggatgaaggtgactattactgtttctcaggatatgttgatagtgatagcaaattgtatgtttttggcagcggaacccagctcaccgtcct

SEQ ID NO: 517 - protein, 156 aa, Artificial Sequence
  chemically synthesized
QGQSGQGILCPEDPWGHKCKLPGGGSSGGSISSGLLSGRSDNHGGGSYELTQPPSASVNVGETVKITCSGDQLPKYFADWFHQRSDQTILQVIYDDNKRPSGIPERISGSSSGTTATLTIRDVRAEDEGDYYCFSGYVDSDSKLYVFGSGTQLTVL

SEQ ID NO: 518 - DNA, 468 bp, Artificial Sequence
  chemically synthesized
caaggccagtctggccaaggtattctgtgcccggaggatccgtgggggcataagtgcaagctgcctggaggtggctcgagcggcggctctatctcttccggactgctgtccggcagatccgacaatcacggcggaggctcttatgagctgactcagccaccttcagcatcagtcaatgtaggagagactgtcaaaatcacctgctctggggaccaattgccgaaatattttgcagattggtttcatcaaaggtcagaccagaccattttgcaagtgatatatgatgataataagcgcccctcgggtatccctgaaagaatctctgggtccagctcagggacaacagccaccttgaccatcagagatgtccgggctgaggatgaaggtgactattactgtttctcaggatatgttgatagtgatagcaaattgtatgtttttggcagcggaacccagctcaccgtccta

SEQ ID NO: 519 - protein, 156 aa, Artificial Sequence
  chemically synthesized
QGQSGQGTNIWSCQTYCDHKHKGGGSSGGSISSGLLSGRSDNHGGGSYELTQPPSASVNVGETVKITCSGDQLPKYFADWFHQRSDQTILQVIYDDNKRPSGIPERISGSSSGTTATLTIRDVRAEDEGDYYCFSGYVDSDSKLYVFGSGTQLTVL

SEQ ID NO: 520 - DNA, 468 bp, Artificial Sequence
  chemically synthesized
caaggccagtctggccaaggtacgaatatttggagttgccagacttattgcgatcataagcataagggaggtggctcgagcggcggctctatctcttccggactgctgtccggcagatccgacaatcacggcggaggctcttatgagctgactcagccaccttcagcatcagtcaatgtaggagagactgtcaaaatcacctgctctggggaccaattgccgaaatattttgcagattggtttcatcaaaggtcagaccagaccattttgcaagtgatatatgatgataataagcgcccctcgggtatccctgaaagaatctctgggtccagctcagggacaacagccaccttgaccatcagagatgtccgggctgaggatgaaggtgactattactgtttctcaggatatgttgatagtgatagcaaattgtatgtttttggcagcggaacccagctcaccgtccta

SEQ ID NO: 521 - protein, 156 aa, Artificial Sequence
  chemically synthesized
QGQSGQGSDHKCKLQNCMNTKVGGGSSGGSISSGLLSGRSDNHGGGSYELTQPPSASVNVGETVKITCSGDQLPKYFADWFHQRSDQTILQVIYDDNKRPSGIPERISGSSSGTTATLTIRDVRAEDEGDYYCFSGYVDSDSKLYVFGSGTQLTVL

SEQ ID NO: 522 - DNA, 468 bp, Artificial Sequence
  chemically synthesized
caaggccagtctggccaaggtagtgatcataagtgcaagcttcagaattgcatgaatactaaggttggaggtggctcgagcggcggctctatctcttccggactgctgtccggcagatccgacaatcacggcggaggctcttatgagctgactcagccaccttcagcatcagtcaatgtaggagagactgtcaaaatcacctgctctggggaccaattgccgaaatattttgcagattggtttcatcaaaggtcagaccagaccattttgcaagtgatatatgatgataataagcgcccctcgggtatccctgaaagaatctctgggtccagctcagggacaacagccaccttgaccatcagagatgtccgggctgaggatgaaggtgactattactgtttctcaggatatgttgatagtgatagcaaattgtatgtttttggcagcggaacccagctcaccgtccta

SEQ ID NO: 523 - protein, 156 aa, Artificial Sequence
  chemically synthesized
QGQSGQGPGNCHPMQKEMCQFIGGGSSGGSISSGLLSGRSDNHGGGSYELTQPPSASVNVGETVKITCSGDQLPKYFADWFHQRSDQTILQVIYDDNKRPSGIPERISGSSSGTTATLTIRDVRAEDEGDYYCFSGYVDSDSKLYVFGSGTQLTVL

SEQ ID NO: 524 - DNA, 468 bp, Artificial Sequence
  chemically synthesized
caaggccagtctggccaaggtcctggtaattgccatcctatgcagaaggagatgtgccagtttattggaggtggctcgagcggcggctctatctcttccggactgctgtccggcagatccgacaatcacggcggaggctcttatgagctgactcagccaccttcagcatcagtcaatgtaggagagactgtcaaaatcacctgctctggggaccaattgccgaaatattttgcagattggtttcatcaaaggtcagaccagaccattttgcaagtgatatatgatgataataagcgcccctcgggtatccctgaaagaatctctgggtccagctcagggacaacagccaccttgaccatcagagatgtccgggctgaggatgaaggtgactattactgtttctcaggatatgttgatagtgatagcaaattgtatgtttttggcagcggaacccagctcaccgtccta

SEQ ID NO: 525 - protein, 156 aa, Artificial Sequence
  chemically synthesized
QGQSGQGVEHLCYTHNKCKHPDGGGSSGGSISSGLLSGRSDNHGGGSYELTQPPSASVNVGETVKITCSGDQLPKYFADWFHQRSDQTILQVIYDDNKRPSGIPERISGSSSGTTATLTIRDVRAEDEGDYYCFSGYVDSDSKLYVFGSGTQLTVL

SEQ ID NO: 526 - DNA, 468 bp, Artificial Sequence
  chemically synthesized
caaggccagtctggccaaggtgttgagcatttgtgctatacgcataataagtgcaagcatcctgatggaggtggctcgagcggcggctctatctcttccggactgctgtccggcagatccgacaatcacggcggaggctcttatgagctgactcagccaccttcagcatcagtcaatgtaggagagactgtcaaaatcacctgctctggggaccaattgccgaaatattttgcagattggtttcatcaaaggtcagaccagaccattttgcaagtgatatatgatgataataagcgcccctcgggtatccctgaaagaatctctgggtccagctcagggacaacagccaccttgaccatcagagatgtccgggctgaggatgaaggtgactattactgtttctcaggatatgttgatagtgatagcaaattgtatgtttttggcagcggaacccagctcaccgtccta

SEQ ID NO: 527 - protein, 156 aa, Artificial Sequence
  chemically synthesized
QGQSGQGTIPRCGQHPKCKDTLGGGSSGGSISSGLLSGRSDNHGGGSYELTQPPSASVNVGETVKITCSGDQLPKYFADWFHQRSDQTILQVIYDDNKRPSGIPERISGSSSGTTATLTIRDVRAEDEGDYYCFSGYVDSDSKLYVFGSGTQLTVL

SEQ ID NO: 528 - DNA, 468 bp, Artificial Sequence
  chemically synthesized
caaggccagtctggccaaggtactattccgaggtgcggtcagcatccgaagtgcaaggatactttgggaggtggctcgagcggcggctctatctcttccggactgctgtccggcagatccgacaatcacggcggaggctcttatgagctgactcagccaccttcagcatcagtcaatgtaggagagactgtcaaaatcacctgctctggggaccaattgccgaaatattttgcagattggtttcatcaaaggtcagaccagaccattttgcaagtgatatatgatgataataagcgcccctcgggtatccctgaaagaatctctgggtccagctcagggacaacagccaccttgaccatcagagatgtccgggctgaggatgaaggtgactattactgtttctcaggatatgttgatagtgatagcaaattgtatgtttttggcagcggaacccagctcaccgtccta

SEQ ID NO: 529 - protein, 156 aa, Artificial Sequence
  chemically synthesized
QGQSGQGACRICQDHPKTKWNSGGGSSGGSISSGLLSGRSDNHGGGSYELTQPPSASVNVGETVKITCSGDQLPKYFADWFHQRSDQTILQVIYDDNKRPSGIPERISGSSSGTTATLTIRDVRAEDEGDYYCFSGYVDSDSKLYVFGSGTQLTVL

SEQ ID NO: 530 - DNA, 468 bp, Artificial Sequence
  chemically synthesized
caaggccagtctggccaaggtgcgtgccgtatttgtcaggatcatcctaagacgaagtggaattctggaggtggctcgagcggcggctctatctcttccggactgctgtccggcagatccgacaatcacggcggaggctcttatgagctgactcagccaccttcagcatcagtcaatgtaggagagactgtcaaaatcacctgctctggggaccaattgccgaaatattttgcagattggtttcatcaaaggtcagaccagaccattttgcaagtgatatatgatgataataagcgcccctcgggtatccctgaaagaatctctgggtccagctcagggacaacagccaccttgaccatcagagatgtccgggctgaggatgaaggtgactattactgtttctcaggatatgttgatagtgatagcaaattgtatgtttttggcagcggaacccagctcaccgtccta

SEQ ID NO: 531 - protein, 156 aa, Artificial Sequence
  chemically synthesized
QGQSGQGLIQCTGNLDHKCKHYGGGSSGGSISSGLLSGRSDNHGGGSYELTQPPSASVNVGETVKITCSGDQLPKYFADWFHQRSDQTILQVIYDDNKRPSGIPERISGSSSGTTATLTIRDVRAEDEGDYYCFSGYVDSDSKLYVFGSGTQLTVL

SEQ ID NO: 532 - DNA, 467 bp, Artificial Sequence
  chemically synthesized
caaggccagtctggccaaggtcttattcagtgcactggtaatcttgatcataagtgcaagcattatggaggtggctcgagcggcggctctatctcttccggactgctgtccggcagatccgacaatcacggcggaggctcttatgagctgactcagccaccttcagcatcagtcaatgtaggagagactgtcaaaatcacctgctctggggaccaattgccgaaatattttgcagattggtttcatcaaaggtcagaccagaccattttgcaagtgatatatgatgataataagcgcccctcgggtatccctgaaagaatctctgggtccagctcagggacaacagccaccttgaccatcagagatgtccgggctgaggatgaaggtgactattactgtttctcaggatatgttgatagtgatagcaaattgtatgtttttggcagcggaacccagctcaccgtcct

SEQ ID NO: 533 - protein, 156 aa, Artificial Sequence
  chemically synthesized
QGQSGQGIPCHHSADHKHKCTSGGGSSGGSISSGLLSGRSDNHGGGSYELTQPPSASVNVGETVKITCSGDQLPKYFADWFHQRSDQTILQVIYDDNKRPSGIPERISGSSSGTTATLTIRDVRAEDEGDYYCFSGYVDSDSKLYVFGSGTQLTVL

SEQ ID NO: 534 - DNA, 468 bp, Artificial Sequence
  chemically synthesized
caaggccagtctggccaaggtattccttgccatcatagtgctgatcataagcataagtgcacgagtggaggtggctcgagcggcggctctatctcttccggactgctgtccggcagatccgacaatcacggcggaggctcttatgagctgactcagccaccttcagcatcagtcaatgtaggagagactgtcaaaatcacctgctctggggaccaattgccgaaatattttgcagattggtttcatcaaaggtcagaccagaccattttgcaagtgatatatgatgataataagcgcccctcgggtatccctgaaagaatctctgggtccagctcagggacaacagccaccttgaccatcagagatgtccgggctgaggatgaaggtgactattactgtttctcaggatatgttgatagtgatagcaaattgtatgtttttggcagcggaacccagctcaccgtccta

SEQ ID NO: 535 - protein, 156 aa, Artificial Sequence
  chemically synthesized
QGQSGQGSRQICADYNCHNKYKGGGSSGGSISSGLLSGRSDNHGGGSYELTQPPSASVNVGETVKITCSGDQLPKYFADWFHQRSDQTILQVIYDDNKRPSGIPERISGSSSGTTATLTIRDVRAEDEGDYYCFSGYVDSDSKLYVFGSGTQLTVL

SEQ ID NO: 536 - DNA, 468 bp, Artificial Sequence
  chemically synthesized
caaggccagtctggccaaggttcgcggcagatttgcgctgattataattgccataataagtataagggaggtggctcgagcggcggctctatctcttccggactgctgtccggcagatccgacaatcacggcggaggctcttatgagctgactcagccaccttcagcatcagtcaatgtaggagagactgtcaaaatcacctgctctggggaccaattgccgaaatattttgcagattggtttcatcaaaggtcagaccagaccattttgcaagtgatatatgatgataataagcgcccctcgggtatccctgaaagaatctctgggtccagctcagggacaacagccaccttgaccatcagagatgtccgggctgaggatgaaggtgactattactgtttctcaggatatgttgatagtgatagcaaattgtatgtttttggcagcggaacccagctcaccgtccta

SEQ ID NO: 537 - protein, 156 aa, Artificial Sequence
  chemically synthesized
QGQSGQGQPCNPQIDHKIKCIYGGGSSGGSISSGLLSGRSDNHGGGSYELTQPPSASVNVGETVKITCSGDQLPKYFADWFHQRSDQTILQVIYDDNKRPSGIPERISGSSSGTTATLTIRDVRAEDEGDYYCFSGYVDSDSKLYVFGSGTQLTVL

SEQ ID NO: 538 - DNA, 468 bp, Artificial Sequence
  chemically synthesized
caaggccagtctggccaaggtcagccttgcaatccgcagattgatcataagattaagtgcatttatggaggtggctcgagcggcggctctatctcttccggactgctgtccggcagatccgacaatcacggcggaggctcttatgagctgactcagccaccttcagcatcagtcaatgtaggagagactgtcaaaatcacctgctctggggaccaattgccgaaatattttgcagattggtttcatcaaaggtcagaccagaccattttgcaagtgatatatgatgataataagcgcccctcgggtatccctgaaagaatctctgggtccagctcagggacaacagccaccttgaccatcagagatgtccgggctgaggatgaaggtgactattactgtttctcaggatatgttgatagtgatagcaaattgtatgtttttggcagcggaacccagctcaccgtccta

SEQ ID NO: 539 - protein, 156 aa, Artificial Sequence
  chemically synthesized
QGQSGQGHYTICMTHNKCKDMAGGGSSGGSISSGLLSGRSDNHGGGSYELTQPPSASVNVGETVKITCSGDQLPKYFADWFHQRSDQTILQVIYDDNKRPSGIPERISGSSSGTTATLTIRDVRAEDEGDYYCFSGYVDSDSKLYVFGSGTQLTVL

SEQ ID NO: 540 - DNA, 468 bp, Artificial Sequence
  chemically synthesized
caaggccagtctggccaaggtcattatactatttgcatgacgcataataagtgcaaggatatggcgggaggtggctcgagcggcggctctatctcttccggactgctgtccggcagatccgacaatcacggcggaggctcttatgagctgactcagccaccttcagcatcagtcaatgtaggagagactgtcaaaatcacctgctctggggaccaattgccgaaatattttgcagattggtttcatcaaaggtcagaccagaccattttgcaagtgatatatgatgataataagcgcccctcgggtatccctgaaagaatctctgggtccagctcagggacaacagccaccttgaccatcagagatgtccgggctgaggatgaaggtgactattactgtttctcaggatatgttgatagtgatagcaaattgtatgtttttggcagcggaacccagctcaccgtccta

SEQ ID NO: 541 - protein, 156 aa, Artificial Sequence
  chemically synthesized
QGQSGQGANSCLAVEHKCKHNYGGGSSGGSISSGLLSGRSDNHGGGSYELTQPPSASVNVGETVKITCSGDQLPKYFADWFHQRSDQTILQVIYDDNKRPSGIPERISGSSSGTTATLTIRDVRAEDEGDYYCFSGYVDSDSKLYVFGSGTQLTVL

SEQ ID NO: 542 - DNA, 468 bp, Artificial Sequence
  chemically synthesized
caaggccagtctggccaaggtgctaatagttgccttgctgttgagcataagtgcaagcataattatggaggtggctcgagcggcggctctatctcttccggactgctgtccggcagatccgacaatcacggcggaggctcttatgagctgactcagccaccttcagcatcagtcaatgtaggagagactgtcaaaatcacctgctctggggaccaattgccgaaatattttgcagattggtttcatcaaaggtcagaccagaccattttgcaagtgatatatgatgataataagcgcccctcgggtatccctgaaagaatctctgggtccagctcagggacaacagccaccttgaccatcagagatgtccgggctgaggatgaaggtgactattactgtttctcaggatatgttgatagtgatagcaaattgtatgtttttggcagcggaacccagctcaccgtccta

SEQ ID NO: 543 - protein, 214 aa, Artificial Sequence
  chemically synthesized
YELTQPPSASVNVGETVKITCSGDQLPKYFADWFHQRSDQTILQVIYDDNKRPSGIPERISGSSSGTTATLTIRDVRAEDEGDYYCFSGYVDSDSKLYVFGSGTQLTVLGGPKSSPKVTVFPPSPEELRTNKATLVCLVNDFYPGSATVTWKANGATINDGVKTTKPSKQGQNYMTSSYLSLTADQWKSHNRVSCQVTHEGETVEKSLSPAECL

SEQ ID NO: 544 - DNA, 642 bp, Artificial Sequence
  chemically synthesized
tatgagctgactcagccaccttcagcatcagtcaatgtaggagagactgtcaaaatcacctgctctggggaccaattgccgaaatattttgcagattggtttcatcaaaggtcagaccagaccattttgcaagtgatatatgatgataataagcgcccctcgggtatccctgaaagaatctctgggtccagctcagggacaacagccaccttgaccatcagagatgtccgggctgaggatgaaggtgactattactgtttctcaggatatgttgatagtgatagcaaattgtatgtttttggcagcggaacccagctcaccgtcctaggtggacccaagtcttctcccaaagtcacagtgtttccaccttcacctgaggagctccggacaaacaaagccacactggtgtgtctggttaatgacttctacccgggttctgcaacagtgacctggaaggcaaatggagcaactatcaatgatggggtgaagactacaaagccttccaaacagggccaaaactacatgaccagcagctacctaagtttgacagcagaccagtggaaatctcacaacagggtttcctgccaagttacccatgaaggggaaactgtggagaagagtttgtcccctgcagaatgtctt

SEQ ID NO: 545 - DNA, 642 bp, Artificial Sequence
  chemically synthesized
tacgagctgacccagcctcctagcgcctccgtgaatgtgggcgagacagtgaagatcacctgtagcggcgaccagctgcccaagtacttcgccgactggttccaccagcggagcgaccagacaatcctgcaagtgatctacgacgacaacaagcggcccagcggcatccccgagagaatcagcggaagcagcagcggcaccaccgccaccctgaccattagagatgtgcgggccgaggacgagggcgactactactgctttagcggctacgtggacagcgacagcaagctgtacgtgttcggctccggtacccagctgacagtgctgggcggacctaagagcagccccaaagtgaccgtgttccccccaagccccgaggaactgaggaccaacaaggccaccctcgtgtgcctcgtgaacgacttctaccctggcagcgccaccgtgacctggaaagccaatggcgccaccatcaacgacggcgtgaaaaccaccaagcccagcaagcagggccagaactacatgaccagcagctacctgagcctgaccgccgaccagtggaagtcccacaacagagtgtcctgccaagtgacccacgagggggaaaccgtggaaaagagcctgagccctgccgagtgcctg

SEQ ID NO: 546 - protein, 451 aa, Artificial Sequence
  chemically synthesized
EVRLLESGGGLVKPEGSLKLSCVASGFTFSDYFMSWVRQAPGKGLEWVAHIYTKSYNYATYYSGSVKGRFTISRDDSRSMVYLQMNNLRTEDTATYYCTRDGSGYPSLDFWGQGTQVTVSSAKTTAPSVYPLAPVCGDTTGSSVTLGCLVKGYFPEPVTLTWNSGSLSSGVHTFPAVLQSDLYTLSSSVTVTSSTWPSQSITCNVAHPASSTKVDKKIEPRGPTIKPCPPCKCPAPNLLGGPSVFIFPPKIKDVLMISLSPIVTCVVVDVSEDDPDVQISWFVNNVEVHTAQTQTHREDYNSTLRVVSALPIQHQDWMSGKEFKCKVNNKDLPAPIERTISKPKGSVRAPQVYVLPPPEEEMTKKQVTLTCMVTDFMPEDIYVEWTNNGKTELNYKNTEPVLDSDGSYFMYSKLRVEKKNWVERNSYSCSVVHEGLHNHHTTKSFSRTPGK

SEQ ID NO: 547 - DNA, 1353 bp, Artificial Sequence
  chemically synthesized
gaggtgcggcttctggagtctggtggaggattagtgaagcctgaggggtcactgaaactctcctgtgtggcctctggattcaccttcagtgactatttcatgagctgggtccgccaggctccagggaaggggctggagtgggttgctcacatatacacgaaaagttataattatgcaacttattactcgggttcggtgaaaggcagattcaccatctccagagatgattcccgaagcatggtctacctgcaaatgaacaacctgagaactgaggacacggccacttattactgtacaagagatggaagcggatatccctctctggatttctggggtcaagggacccaagtcactgtctcctcagctaaaacaacagccccatcggtctatccactggcccctgtgtgtggagatacaactggctcctcggtgactctaggatgcctggtcaagggttatttccctgagccagtgaccttgacctggaactctggatccctgtccagtggtgtgcacaccttcccagctgtcctgcagtctgacctctacaccctcagcagctcagtgactgtaacctcgagcacctggcccagccagtccatcacctgcaatgtggcccacccggcaagcagcaccaaggtggacaagaaaattgagcccagagggcccacaatcaagccctgtcctccatgcaaatgcccagcacctaacctcttgggtggaccatccgtcttcatcttccctccaaagatcaaggatgtactcatgatctccctgagccccatagtcacatgtgtggtggtggatgtgagcgaggatgacccagatgtccagatcagctggtttgtgaacaacgtggaagtacacacagctcagacacaaacccatagagaggattacaacagtactctccgggtggtcagtgccctccccatccagcaccaggactggatgagtggcaaggagttcaaatgcaaggtcaacaacaaagacctcccagcgcccatcgagagaaccatctcaaaacccaaagggtcagtaagagctccacaggtatatgtcttgcctccaccagaagaagagatgactaagaaacaggtcactctgacctgcatggtcacagacttcatgcctgaagacatttacgtggagtggaccaacaacgggaaaacagagctaaactacaagaacactgaaccagtcctggactctgatggttcttacttcatgtacagcaagctgagagtggaaaagaagaactgggtggaaagaaatagctactcctgttcagtggtccacgagggtctgcacaatcaccacacgactaagagcttctcccggactccgggtaaa

SEQ ID NO: 548 - protein, 10 aa, Artificial Sequence
  chemically synthesized
QDHPKTKWNS

SEQ ID NO: 549 - protein, 15 aa, Artificial Sequence
  chemically synthesized
ACRICQDHPATKWNS

SEQ ID NO: 550 - protein, 15 aa, Artificial Sequence
  chemically synthesized
ACRICQDHPKTAWNS

SEQ ID NO: 551 - protein, 15 aa, Artificial Sequence
  chemically synthesized
ACRICQDAPKTKWNS

SEQ ID NO: 552 - protein, 15 aa, Artificial Sequence
  chemically synthesized
ACRICQDHAKTKWNS

SEQ ID NO: 553 - protein, 9 aa, Artificial Sequence
  chemically synthesized
DHPATKWNS

SEQ ID NO: 554 - protein, 9 aa, Artificial Sequence
  chemically synthesized
DHPKTAWNS

SEQ ID NO: 555 - protein, 9 aa, Artificial Sequence
  chemically synthesized
DAPKTKWNS

SEQ ID NO: 556 - protein, 9 aa, Artificial Sequence
  chemically synthesized
DAPATKWNS

SEQ ID NO: 557 - protein, 9 aa, Artificial Sequence
  chemically synthesized
ACRICQDHP

SEQ ID NO: 558 - protein, 8 aa, Artificial Sequence
  chemically synthesized
HPQSKDTL

SEQ ID NO: 559 - protein, 8 aa, Artificial Sequence
  chemically synthesized
HPKSQDTL

SEQ ID NO: 560 - protein, 15 aa, Artificial Sequence
  chemically synthesized
TIPRCGQHPLCLDTL

SEQ ID NO: 561 - protein, 8 aa, Artificial Sequence
  chemically synthesized
HPLSLDTL

SEQ ID NO: 562 - protein, 8 aa, Artificial Sequence
  chemically synthesized
HPASKDTL

SEQ ID NO: 563 - protein, 8 aa, Artificial Sequence
  chemically synthesized
HPKSADTL

SEQ ID NO: 564 - protein, 15 aa, Artificial Sequence
  chemically synthesized
PGNCHPLQKELCQFI

SEQ ID NO: 565 - protein, 11 aa, Artificial Sequence
  chemically synthesized
HPLQKELAQFI

SEQ ID NO: 566 - protein, 11 aa, Artificial Sequence
  chemically synthesized
HPLALELAQFI

SEQ ID NO: 567 - protein, 15 aa, Artificial Sequence
  chemically synthesized
PGNCHPLQLELCQFI

SEQ ID NO: 568 - protein, 15 aa, Artificial Sequence
  chemically synthesized
TNIWSCQTYCDHAHA

SEQ ID NO: 569 - protein, 15 aa, Artificial Sequence
  chemically synthesized
TNIWSCQTYCDHAHL

SEQ ID NO: 570 - protein, 15 aa, Artificial Sequence
  chemically synthesized
TNIWSCQTYCDHLHA

SEQ ID NO: 571 - protein, 15 aa, Artificial Sequence
  chemically synthesized
TNIWSCQTYCDHKHA

SEQ ID NO: 572 - protein, 152 aa, Artificial Sequence
  chemically synthesized
QGQSGQGHPLQKELAQFIGGGSSGGSISSGLLSGRSDNHGGGSYELTQPPSASVNVGETVKITCSGDQLPKYFADWFHQRSDQTILQVIYDDNKRPSGIPERISGSSSGTTATLTIRDVRAEDEGDYYCFSGYVDSDSKLYVFGSGTQLTVL

SEQ ID NO: 573 - DNA, 771 bp, Artificial Sequence
  chemically synthesized
caaggccagtctggccaaggtcatcctctgcagaaggagctggcccagtttattggaggtggctcgagcggcggctctatctcttccggactgctgtccggcagatccgacaatcacggcggaggctcttacgagctgacccagcctcctagcgcctccgtgaatgtgggcgagacagtgaagatcacctgtagcggcgaccagctgcccaagtacttcgccgactggttccaccagcggagcgaccagacaatcctgcaagtgatctacgacgacaacaagcggcccagcggcatccccgagagaatcagcggaagcagcagcggcaccaccgccaccctgaccattagagatgtgcgggccgaggacgagggcgactactactgctttagcggctacgtggacagcgacagcaagctgtacgtgttcggctccggtacccagctgacagtgctgggcggacctaagagcagccccaaagtgaccgtgttccccccaagccccgaggaactgaggaccaacaaggccaccctcgtgtgcctcgtgaacgacttctaccctggcagcgccaccgtgacctggaaagccaatggcgccaccatcaacgacggcgtgaaaaccaccaagcccagcaagcagggccagaactacatgaccagcagctacctgagcctgaccgccgaccagtggaagtcccacaacagagtgtcctgccaagtgacccacgagggggaaaccgtggaaaagagcctgagccctgccgagtgcctg

SEQ ID NO: 574 - protein, 149 aa, Artificial Sequence
  chemically synthesized
QGQSGQGHPQSKDTLGGGSSGGSISSGLLSGRSDNHGGGSYELTQPPSASVNVGETVKITCSGDQLPKYFADWFHQRSDQTILQVIYDDNKRPSGIPERISGSSSGTTATLTIRDVRAEDEGDYYCFSGYVDSDSKLYVFGSGTQLTVL

SEQ ID NO: 575 - DNA, 762 bp, Artificial Sequence
  chemically synthesized
caaggccagtctggccaaggtcatccgcagtctaaggatactttgggaggtggctcgagcggcggctctatctcttccggactgctgtccggcagatccgacaatcacggcggaggctcttacgagctgacccagcctcctagcgcctccgtgaatgtgggcgagacagtgaagatcacctgtagcggcgaccagctgcccaagtacttcgccgactggttccaccagcggagcgaccagacaatcctgcaagtgatctacgacgacaacaagcggcccagcggcatccccgagagaatcagcggaagcagcagcggcaccaccgccaccctgaccattagagatgtgcgggccgaggacgagggcgactactactgctttagcggctacgtggacagcgacagcaagctgtacgtgttcggctccggtacccagctgacagtgctgggcggacctaagagcagccccaaagtgaccgtgttccccccaagccccgaggaactgaggaccaacaaggccaccctcgtgtgcctcgtgaacgacttctaccctggcagcgccaccgtgacctggaaagccaatggcgccaccatcaacgacggcgtgaaaaccaccaagcccagcaagcagggccagaactacatgaccagcagctacctgagcctgaccgccgaccagtggaagtcccacaacagagtgtcctgccaagtgacccacgagggggaaaccgtggaaaagagcctgagccctgccgagtgcctg

SEQ ID NO: 576 - protein, 149 aa, Artificial Sequence
  chemically synthesized
QGQSGQGHPASKDTLGGGSSGGSISSGLLSGRSDNHGGGSYELTQPPSASVNVGETVKITCSGDQLPKYFADWFHQRSDQTILQVIYDDNKRPSGIPERISGSSSGTTATLTIRDVRAEDEGDYYCFSGYVDSDSKLYVFGSGTQLTVL

SEQ ID NO: 577 - DNA, 762 bp, Artificial Sequence
  chemically synthesized
caaggccagtctggccaaggtcatccggcgtctaaggatactttgggaggtggctcgagcggcggctctatctcttccggactgctgtccggcagatccgacaatcacggcggaggctcttacgagctgacccagcctcctagcgcctccgtgaatgtgggcgagacagtgaagatcacctgtagcggcgaccagctgcccaagtacttcgccgactggttccaccagcggagcgaccagacaatcctgcaagtgatctacgacgacaacaagcggcccagcggcatccccgagagaatcagcggaagcagcagcggcaccaccgccaccctgaccattagagatgtgcgggccgaggacgagggcgactactactgctttagcggctacgtggacagcgacagcaagctgtacgtgttcggctccggtacccagctgacagtgctgggcggacctaagagcagccccaaagtgaccgtgttccccccaagccccgaggaactgaggaccaacaaggccaccctcgtgtgcctcgtgaacgacttctaccctggcagcgccaccgtgacctggaaagccaatggcgccaccatcaacgacggcgtgaaaaccaccaagcccagcaagcagggccagaactacatgaccagcagctacctgagcctgaccgccgaccagtggaagtcccacaacagagtgtcctgccaagtgacccacgagggggaaaccgtggaaaagagcctgagccctgccgagtgcctg

SEQ ID NO: 578 - protein, 156 aa, Artificial Sequence
  chemically synthesized
QGQSGQGACRICQDHPATKWNSGGGSSGGSISSGLLSGRSDNHGGGSYELTQPPSASVNVGETVKITCSGDQLPKYFADWFHQRSDQTILQVIYDDNKRPSGIPERISGSSSGTTATLTIRDVRAEDEGDYYCFSGYVDSDSKLYVFGSGTQLTVL

SEQ ID NO: 579 - DNA, 782 bp, Artificial Sequence
  chemically synthesized
caaggccagtctggccaaggtgcgtgccgtatttgtcaggatcatcctgcgacgaagtggaattctggaggtggctcgagcggcggctctatctcttccggactgctgtccggcagatccgacaatcacggcggaggctctacgagctgacccagcctcctagcgcctccgtgaatgtgggcgagacagtgaagatcacctgtagcggcgaccagctgcccaagtacttcgccgactggttccaccagcggagcgaccagacaatcctgcaagtgatctacgacgacaacaagcggcccagcggcatccccgagagaatcagcggaagcagcagcggcaccaccgccaccctgaccattagagatgtgcgggccgaggacgagggcgactactactgctttagcggctacgtggacagcgacagcaagctgtacgtgttcggctccggtacccagctgacagtgctgggcggacctaagagcagccccaaagtgaccgtgttccccccaagccccgaggaactgaggaccaacaaggccaccctcgtgtgcctcgtgaacgacttctaccctggcagcgccaccgtgacctggaaagccaatggcgccaccatcaacgacggcgtgaaaaccaccaagcccagcaagcagggccagaactacatgaccagcagctacctgagcctgaccgccgaccagtggaagtcccacaacagagtgtcctgccaagtgacccacgagggggaaaccgtggaaaagagcctgagccctgccgagtgcctg

SEQ ID NO: 580 - protein, 150 aa, Artificial Sequence
  chemically synthesized
QGQSGQGDAPKTKWNSGGGSSGGSISSGLLSGRSDNHGGGSYELTQPPSASVNVGETVKITCSGDQLPKYFADWFHQRSDQTILQVIYDDNKRPSGIPERISGSSSGTTATLTIRDVRAEDEGDYYCFSGYVDSDSKLYVFGSGTQLTVL

SEQ ID NO: 581 - DNA, 765 bp, Artificial Sequence
  chemically synthesized
caaggccagtctggccaaggtgatgctcctaagacgaagtggaattctggaggtggctcgagcggcggctctatctcttccggactgctgtccggcagatccgacaatcacggcggaggctcttacgagctgacccagcctcctagcgcctccgtgaatgtgggcgagacagtgaagatcacctgtagcggcgaccagctgcccaagtacttcgccgactggttccaccagcggagcgaccagacaatcctgcaagtgatctacgacgacaacaagcggcccagcggcatccccgagagaatcagcggaagcagcagcggcaccaccgccaccctgaccattagagatgtgcgggccgaggacgagggcgactactactgctttagcggctacgtggacagcgacagcaagctgtacgtgttcggctccggtacccagctgacagtgctgggcggacctaagagcagccccaaagtgaccgtgttccccccaagccccgaggaactgaggaccaacaaggccaccctcgtgtgcctcgtgaacgacttctaccctggcagcgccaccgtgacctggaaagccaatggcgccaccatcaacgacggcgtgaaaaccaccaagcccagcaagcagggccagaactacatgaccagcagctacctgagcctgaccgccgaccagtggaagtcccacaacagagtgtcctgccaagtgacccacgagggggaaaccgtggaaaagagcctgagccctgccgagtgcctg

SEQ ID NO: 582 - protein, 150 aa, Artificial Sequence
  chemically synthesized
QGQSGQGDAPATKWNSGGGSSGGSISSGLLSGRSDNHGGGSYELTQPPSASVNVGETVKITCSGDQLPKYFADWFHQRSDQTILQVIYDDNKRPSGIPERISGSSSGTTATLTIRDVRAEDEGDYYCFSGYVDSDSKLYVFGSGTQLTVL

SEQ ID NO: 583 - DNA, 765 bp, Artificial Sequence
  chemically synthesized
caaggccagtctggccaaggtgatgctcctgcgacgaagtggaattctggaggtggctcgagcggcggctctatctcttccggactgctgtccggcagatccgacaatcacggcggaggctcttacgagctgacccagcctcctagcgcctccgtgaatgtgggcgagacagtgaagatcacctgtagcggcgaccagctgcccaagtacttcgccgactggttccaccagcggagcgaccagacaatcctgcaagtgatctacgacgacaacaagcggcccagcggcatccccgagagaatcagcggaagcagcagcggcaccaccgccaccctgaccattagagatgtgcgggccgaggacgagggcgactactactgctttagcggctacgtggacagcgacagcaagctgtacgtgttcggctccggtacccagctgacagtgctgggcggacctaagagcagccccaaagtgaccgtgttccccccaagccccgaggaactgaggaccaacaaggccaccctcgtgtgcctcgtgaacgacttctaccctggcagcgccaccgtgacctggaaagccaatggcgccaccatcaacgacggcgtgaaaaccaccaagcccagcaagcagggccagaactacatgaccagcagctacctgagcctgaccgccgaccagtggaagtcccacaacagagtgtcctgccaagtgacccacgagggggaaaccgtggaaaagagcctgagccctgccgagtgcctg

SEQ ID NO: 584 - DNA, 474 bp, Artificial Sequence
  chemically synthesized
caaggccagtctggccaaggtccttatatttgctctagttttccgttggattgccaggcgggtcagggaggtggctcgagcggcggctctatctcttccggactgctgtccggcagatccgacaatcacggcggaggatccgatatccagctgacccagagccctagcagcctgtctgccagcgtgggcgacagagtgaccatcacctgtagagccagcgagagcgtggacgcttacggcatcagcttcatgaactggttccagcagaagcccggcaaggcccccaagctgctgatctacgccgccagcaatcagggcagcggcgtgccaagcagattttccggctctggcagcggcaccgacttcaccctgaccatcagcagcatgcagcccgaggacttcgccacctactactgccagcagagcaaggacgtgccctggacctttggccagggtaccaagctggaaatcaag

SEQ ID NO: 585 - protein, 273 aa, Artificial Sequence
  chemically synthesized
GGGSGGGGSGSGGGSGGGGSGGGEIVLTQSPGTLSLSPGERATLSCRASQSVSSSYLAWYQQKPGQAPRLLIYGASSRATGIPDRFSGSGSGTDFTLTISRLEPEDFAVYYCQQYGSSPLTFGGGTKVEIKRSGGSTITSYNVYYTKLSSSGTQVQLVQTGGGVVQPGRSLRLSCAASGSTFSSYAMSWVRQAPGKGLEWVSAISGSGGSTYYADSVKGRFTISRDNSKNTLYLQMNSLRAEDTAVYYCATNSLYWYFDLWGRGTLVTVSSAS

SEQ ID NO: 586 - protein, 264 aa, Artificial Sequence
  chemically synthesized
GGGSGGGGSGSGGGSGGGGSGGGQVQLQQSGAELARPGASVKMSCKASGYTFTRYTMHWVKQRPGQGLEWIGYINPSRGYTNYNQKFKDKATLTTDKSSSTAYMQLSSLTSEDSAVYYCARYYDDHYCLDYWGQGTTLTVSSGGGGSGGGGSGGGGSQIVLTQSPAIMSASPGEKVTMTCSASSSVSYMNWYQQKSGTSPKRWIYDTSKLASGVPAHFRGSGSGTSYSLTISGMEAEDAATYYCQQWSSNPFTFGSGTKLEINR

SEQ ID NO: 587 - protein, 8 aa, Artificial Sequence
  chemically synthesized
PRFKIIGG

SEQ ID NO: 588 - protein, 8 aa, Artificial Sequence
  chemically synthesized
PRFRIIGG

SEQ ID NO: 589 - protein, 9 aa, Artificial Sequence
  chemically synthesized
SSRHRRALD

SEQ ID NO: 590 - protein, 14 aa, Artificial Sequence
  chemically synthesized
RKSSIIIRMRDVVL

SEQ ID NO: 591 - protein, 15 aa, Artificial Sequence
  chemically synthesized
SSSFDKGKYKKGDDA

SEQ ID NO: 592 - protein, 15 aa, Artificial Sequence
  chemically synthesized
SSSFDKGKYKRGDDA

SEQ ID NO: 593 - protein, 4 aa, Artificial Sequence
  chemically synthesized
IEGR

SEQ ID NO: 594 - protein, 4 aa, Artificial Sequence
  chemically synthesized
IDGR

SEQ ID NO: 595 - protein, 7 aa, Artificial Sequence
  chemically synthesized
GGSIDGR

SEQ ID NO: 596 - protein, 6 aa, Artificial Sequence
  chemically synthesized
PLGLWA

SEQ ID NO: 597 - protein, 8 aa, Artificial Sequence
  chemically synthesized
GPQGIAGQ

SEQ ID NO: 598 - protein, 8 aa, Artificial Sequence
  chemically synthesized
GPQGLLGA

SEQ ID NO: 599 - protein, 5 aa, Artificial Sequence
  chemically synthesized
GIAGQ

SEQ ID NO: 600 - protein, 8 aa, Artificial Sequence
  chemically synthesized
GPLGIAGI

SEQ ID NO: 601 - protein, 8 aa, Artificial Sequence
  chemically synthesized
GPEGLRVG

SEQ ID NO: 602 - protein, 8 aa, Artificial Sequence
  chemically synthesized
YGAGLGVV

SEQ ID NO: 603 - protein, 8 aa, Artificial Sequence
  chemically synthesized
AGLGVVER

SEQ ID NO: 604 - protein, 8 aa, Artificial Sequence
  chemically synthesized
AGLGISST

SEQ ID NO: 605 - protein, 8 aa, Artificial Sequence
  chemically synthesized
EPQALAMS

SEQ ID NO: 606 - protein, 8 aa, Artificial Sequence
  chemically synthesized
QALAMSAI

SEQ ID NO: 607 - protein, 8 aa, Artificial Sequence
  chemically synthesized
AAYHLVSQ

SEQ ID NO: 608 - protein, 8 aa, Artificial Sequence
  chemically synthesized
MDAFLESS

SEQ ID NO: 609 - protein, 8 aa, Artificial Sequence
  chemically synthesized
ESLPVVAV

SEQ ID NO: 610 - protein, 8 aa, Artificial Sequence
  chemically synthesized
SAPAVESE

SEQ ID NO: 611 - protein, 8 aa, Artificial Sequence
  chemically synthesized
DVAQFVLT

SEQ ID NO: 612 - protein, 8 aa, Artificial Sequence
  chemically synthesized
VAQFVLTE

SEQ ID NO: 613 - protein, 8 aa, Artificial Sequence
  chemically synthesized
AQFVLTEG

SEQ ID NO: 614 - protein, 8 aa, Artificial Sequence
  chemically synthesized
PVQPIGPQ

SEQ ID NO: 615 - protein, 113 aa, Artificial Sequence
  chemically synthesized
QVQLVESGGDVVQPGGSLRLSCAASGVAFSNYGMHWVRQAPGKGLEWVAVIWYDGSNKYYADSVKGRFTISRDNSKNMLYLQMNSLRAEDTAMYYCARNDDYWGQGTLVTVSS

SEQ ID NO: 616 - DNA, 447 bp, Artificial Sequence
  chemically synthesized
gcgtgccgtatttgtcaggatcatcctgcgacgaagtggaattctggaggtggctcgagcggcggctctatctcttccggactgctgtccggcagatccgctaatcccggcggaggatcctacgagctgacccagcctcctagcgcctccgtgaatgtgggcgagacagtgaagatcacctgtagcggcgaccagctgcccaagtacttcgccgactggttccaccagcggagcgaccagacaatcctgcaagtgatctacgacgacaacaagcggcccagcggcatccccgagagaatcagcggaagcagcagcggcaccaccgccaccctgaccattagagatgtgcgggccgaggacgagggcgactactactgctttagcggctacgtggacagcgacagcaagctgtacgtgttcggctccggtacccagctgacagtgctg

SEQ ID NO: 617 - protein, 113 aa, Artificial Sequence
  chemically synthesized
QVQLVESGGDVVQPGRSLRLSCAASGLTFTNYGFHWVRQAPGKGLEWVAVIWYDGSKKYYADSVKGRFTISRDNSKNTLYLQMNNLRAEDTAVYYCATGDDYWGQGTLVTVSS

SEQ ID NO: 618 - protein, 113 aa, Artificial Sequence
  chemically synthesized
QVYLVESGGGVVQPGRSLRLSCAASGFTFSNYGMHWVRQAPGKGLEWVALIWYDGSNKYYADSVKGRFTISRDNSKNTLYLQMTSLRVEDTAVYYCASNVDHWGQGTLVTVSS

SEQ ID NO: 619 - protein, 119 aa, Artificial Sequence
  chemically synthesized
QVQLQQSGAELMKPGASVKMSCKTTGYIFSSYWIGWVKQRPGHGLEWIGKIFPGSGSADYNENFKGKATFTVDTSSNTAYMQLSSLTSEDSAVYYCARGYGNYLYFDVWGAGTTVTVSS

SEQ ID NO: 620 - protein, 121 aa, Artificial Sequence
  chemically synthesized
QLQLQESGPGLVKPSETLSLTCTVSGGSLSRSSFFWGWIRQPPGKGLEWIGSIYYSGSTYYNPSLKSRVTISVDTSKNQFSLKLSSVTAADTAVYYCVRDYDILTGDEDYWGQGTLVTVSS

SEQ ID NO: 621 - protein, 113 aa, Artificial Sequence
  chemically synthesized
QVQLVESGGGVVQPGRSLRLSCTTSGITFSSYGFHWVRQAPGKGLEWVAVIWYDGSKKYYADSVKGRFTLSRDDSKNTLYLQMNSLRAEDTAVYYCVTGDDYWGQGTLVTVSS

SEQ ID NO: 622 - protein, 7 aa, Artificial Sequence
  chemically synthesized
MSYNGNN

SEQ ID NO: 623 - protein, 121 aa, Artificial Sequence
  chemically synthesized
QLQLQESGPGLVKPSETLSLTCSVSGGSLSRSSYFWGWIRQPPGKGLEWIASIFYSGETYFNPSLKSRVTISVDTSRNQFSLKLSSVTAADTAVYYCARDYDILTGDEDYWGQGTLVTVSS

SEQ ID NO: 624 - protein, 107 aa, Artificial Sequence
  chemically synthesized
EIVLTQSPATLSLSPGERATLSCRASQSVSSYLAWYQQKPGQAPRLIIYDASNRATGIPARFSGSGSGTDFTLTISSLEPEDFAVYYCQQRSNWPLTFGGGTKVEIK

SEQ ID NO: 625 - protein, 107 aa, Artificial Sequence
  chemically synthesized
EIVLTQSPATLSLSPGERATLSCRASQSVSSYLAWYQQKPGQAPRLLIYDTSNRATGIPARFSGSGSGTDFTLTISSLEPEDFAVYYCQQRSNWPLTFGGGTKVEIK

SEQ ID NO: 626 - protein, 107 aa, Artificial Sequence [sequence omitted]

SEQ ID NO: 627 - protein, 119 aa, Artificial Sequence
  chemically synthesized
EVQLVLSGGGFVQPGGSLKLSCAASGFTFSSYAMSWVRQNPERRLVWVATITGGGRNTYYPDSVKGRFTISRDNAKNTLYLQMSSLRSEDTAMYYCTRQGYDGYTWFAYWGQGTLVTVS

SEQ ID NO: 628 - protein, 107 aa, Artificial Sequence
  chemically synthesized
DIQMTQSPSSLSASVGDRVSITCRASQGISSWLAWYQQKPEKAPKSLIYAASNLRSGVPSRFSGSGSGTDFTLTISSLQPEDFATYYCQQYYSYPRTFGQGTKVEIK

SEQ ID NO: 629 - protein, 107 aa, Artificial Sequence
  chemically synthesized
EIVLTQSPATLSLSPGERATLSCRASQSVSSYLAWYQQKPGQAPRLLIYDASNRATGIPARFSGSGSGTDFTLTISSLEPEDFAVYYCQQRSNWPLTFGGGTKVEIK

SEQ ID NO: 630 - protein, 107 aa, Artificial Sequence
  chemically synthesized
DIQMTQSPSSLSASVGDRVTITCRASQGISSWLAWYQQKPEKAPKSLIYAASSLQSGVPSRFSGSGSGTDFTLTISSLQPEDFATYYCQQYYSYPRTFGQGTKVEIK

SEQ ID NO: 631 - protein, 122 aa, Artificial Sequence
  chemically synthesized
QVQLQQPGAELVKPGASVKLSCKASGYTFTSYYLYWMKQRPGQGLEWIGGVNPSNGGTNFSEKFKSKATLTVDKSSSTAYMQLSSLTSEDSAVYYCTRRDSNYDGGFDYWGQGTTLTVSSAK

SEQ ID NO: 632 - protein, 122 aa, Artificial Sequence
  chemically synthesized
QVQLQQPGAELVKPGTSVKLSCKASGYTFTNYYMYWVKQRPGQGLEWIGGINPSNGGTNFNEKFKNKATLTVDSSSSTTYMQLSSLTSEDSAVYYCTRRDYRFDMGFDYWGQGTTLTVSSAK

SEQ ID NO: 633 - protein, 139 aa, Artificial Sequence
  chemically synthesized
MDWTWSILFLVAAPTGAHSQVQLVQSGVEVKKPGASVKVSCKASGYTFTNYYMYWVRQAPGQGLEWMGGINPSNGGTNFNEKFKNRVTLTTDSSTTTAYMELKSLQFDDTAVYYCARRDYRFDMGFDYWGQGTTVTVSS

SEQ ID NO: 634 - protein, 120 aa, Artificial Sequence [sequence omitted]

SEQ ID NO: 635 - protein, 111 aa, Artificial Sequence
  chemically synthesized
DIVLTQSPTSLAVSLGQRATISCRASKSVSTSGFSYLHWYQQKPGQPPKLLIFLASNLESGVPARFSGSGSGTDFTLNIHPVEEEDAATYYCQHSWELPLTFGAGTKLELK

SEQ ID NO: 636 - protein, 111 aa, Artificial Sequence
  chemically synthesized
DIVLTQSPASLAVSLGQRAAISCRASKGVSTSGYSYLHWYQQKPGQSPKLLIYLASYLESGVPARFSGSGSGTDFTLNIHPVEEEDAATYYCQHSRDLPLTFGTGTKLELK

SEQ ID NO: 637 - protein, 130 aa, Artificial Sequence
  chemically synthesized
MAPVQLLGLLVLFLPAMRCEIVLTQSPATLSLSPGERATLSCRASKGVSTSGYSYLHWYQQKPGQAPRLLIYLASYLESGVPARFSGSGSGTDFTLTISSLEPEDFAVYYCQHSRDLPLTFGGGTKVEIK

SEQ ID NO: 638 - protein, 111 aa, Artificial Sequence [sequence omitted]

SEQ ID NO: 639 - protein, 130 aa, Artificial Sequence
  chemically synthesized
MAPVQLLGLLVLFLPAMRCEIVLTQSPLSLPVTPGEPASISCRASKGVSTSGYSYLHWYLQKPGQSPQLLIYLASYLESGVPDRFSGSGSGTDFTLKISRVEAEDVGVYYCQHSRDLPLTFGQGTKLEIK

SEQ ID NO: 640 - protein, 111 aa, Artificial Sequence
  chemically synthesized
EIVLTQSPLSLPVTPGEPASISCRASKGVSTSGYSYLHWYLQKPGQSPQLLIYLASYLESGVPDRFSGSGSGTDFTLKISRVEAEDVGVYYCQHSRDLPLTFGQGTKLEIK

SEQ ID NO: 641 - protein, 130 aa, Artificial Sequence
  chemically synthesized
MAPVQLLGLLVLFLPAMRCDIVMTQTPLSLPVTPGEPASISCRASKGVSTSGYSYLHWYLQKPGQSPQLLIYLASYLESGVPDRFSGSGSGTAFTLKISRVEAEDVGLYYCQHSRDLPLTFGQGTKLEIK

SEQ ID NO: 642 - protein, 111 aa, Artificial Sequence
  chemically synthesized
DIVMTQTPLSLPVTPGEPASISCRASKGVSTSGYSYLHWYLQKPGQSPQLLIYLASYLESGVPDRFSGSGSGTAFTLKISRVEAEDVGLYYCQHSRDLPLTFGQGTKLEIK

SEQ ID NO: 643 - protein, 466 aa, Artificial Sequence
  chemically synthesized
MAVLGLLFCLVTFPSCVLSQVQLVQSGVEVKKPGASVKVSCKASGYTFTNYYMYWVRQAPGQGLEWMGGINPSNGGTNFNEKFKNRVTLTTDSSTTTAYMELKSLQFDDTAVYYCARRDYRFDMGFDYWGQGTTVTVSSASTKGPSVFPLAPCSRSTSESTAALGCLVKDYFPEPVTVSWNSGALTSGVHTFPAVLQSSGLYSLSSVVTVPSSSLGTKTYTCNVDHKPSNTKVDKRVESKYGPPCPPCPAPEFLGGPSVFLFPPKPKDTLMISRTPEVTCVVVDVSQEDPEVQFNWYVDGVEVHNAKTKPREEQFNSTYRVVSVLTVLHQDWLNGKEYKCKVSNKGLPSSIEKTISKAKGQPREPQVYTLPPSQEEMTKNQVSLTCLVKGFYPSDIAVEWESNGQPENNYKTTPPVLDSDGSFFLYSRLTVDKSRWQEGNVFSCSVMHEALHNHYTQKSLSLSLGK

SEQ ID NO: 644 - protein, 447 aa, Artificial Sequence
  chemically synthesized
QVQLVQSGVEVKKPGASVKVSCKASGYTFTNYYMYWVRQAPGQGLEWMGGINPSNGGTNFNEKFKNRVTLTTDSSTTTAYMELKSLQFDDTAVYYCARRDYRFDMGFDYWGQGTTVTVSSASTKGPSVFPLAPCSRSTSESTAALGCLVKDYFPEPVTVSWNSGALTSGVHTFPAVLQSSGLYSLSSVVTVPSSSLGTKTYTCNVDHKPSNTKVDKRVESKYGPPCPPCPAPEFLGGPSVFLFPPKPKDTLMISRTPEVTCVVVDVSQEDPEVQFNWYVDGVEVHNAKTKPREEQFNSTYRVVSVLTVLHQDWLNGKEYKCKVSNKGLPSSIEKTISKAKGQPREPQVYTLPPSQEEMTKNQVSLTCLVKGFYPSDIAVEWESNGQPENNYKTTPPVLDSDGSFFLYSRLTVDKSRWQEGNVFSCSVMHEALHNHYTQKSLSLSLGK

SEQ ID NO: 645 - protein, 469 aa, Artificial Sequence
  chemically synthesized
MAVLGLLFCLVTFPSCVLSQVQLVQSGVEVKKPGASVKVSCKASGYTFTNYYMYWVRQAPGQGLEWMGGINPSNGGTNFNEKFKNRVTLTTDSSTTTAYMELKSLQFDDTAVYYCARRDYRFDMGFDYWGQGTTVTVSSASTKGPSVFPLAPSSKSTSGGTAALGCLVKDYFPEPVTVSWNSGALTSGVHTFPAVLQSSGLYSLSSVVTVPSSSLGTQTYICNVNHKPSNTKVDKKVEPKSCDKTHTCPPCPAPELLGGPSVFLFPPKPKDTLMISRTPEVTCVVVDVSHEDPEVKFNWYVDGVEVHNAKTKPREEQYNSTYRVVSVLTVLHQDWLNGKEYKCKVSNKALPAPIEKTISKAKGQPREPQVYTLPPSRDELTKNQVSLTCLVKGFYPSDIAVEWESNGQPENNYKTTPPVLDSDGSFFLYSKLTVDKSRWQQGNVFSCSVMHEALHNHYTQKSLSLSPGK

SEQ ID NO: 646 - protein, 450 aa, Artificial Sequence
  chemically synthesized
QVQLVQSGVEVKKPGASVKVSCKASGYTFTNYYMYWVRQAPGQGLEWMGGINPSNGGTNFNEKFKNRVTLTTDSSTTTAYMELKSLQFDDTAVYYCARRDYRFDMGFDYWGQGTTVTVSSASTKGPSVFPLAPSSKSTSGGTAALGCLVKDYFPEPVTVSWNSGALTSGVHTFPAVLQSSGLYSLSSVVTVPSSSLGTQTYICNVNHKPSNTKVDKKVEPKSCDKTHTCPPCPAPELLGGPSVFLFPPKPKDTLMISRTPEVTCVVVDVSHEDPEVKFNWYVDGVEVHNAKTKPREEQYNSTYRVVSVLTVLHQDWLNGKEYKCKVSNKALPAPIEKTISKAKGQPREPQVYTLPPSRDELTKNQVSLTCLVKGFYPSDIAVEWESNGQPENNYKTTPPVLDSDGSFFLYSKLTVDKSRWQQGNVFSCSVMHEALHNHYTQKSLSLSPGK

SEQ ID NO: 647 - protein, 237 aa, Artificial Sequence
  chemically synthesized
MAPVQLLGLLVLFLPAMRCEIVLTQSPATLSLSPGERATLSCRASKGVSTSGYSYLHWYQQKPGQAPRLLIYLASYLESGVPARFSGSGSGTDFTLTISSLEPEDFAVYYCQHSRDLPLTFGGGTKVEIKRTVAAPSVFIFPPSDEQLKSGTASVVCLLNNFYPREAKVQWKVDNALQSGNSQESVTEQDSKDSTYSLSSTLTLSKADYEKHKVYACEVTHQGLSSPVTKSFNRGEC

SEQ ID NO: 648 - protein, 218 aa, Artificial Sequence
  chemically synthesized
EIVLTQSPATLSLSPGERATLSCRASKGVSTSGYSYLHWYQQKPGQAPRLLIYLASYLESGVPARFSGSGSGTDFTLTISSLEPEDFAVYYCQHSRDLPLTFGGGTKVEIKRTVAAPSVFIFPPSDEQLKSGTASVVCLLNNFYPREAKVQWKVDNALQSGNSQESVTEQDSKDSTYSLSSTLTLSKADYEKHKVYACEVTHQGLSSPVTKSFNRGEC

SEQ ID NO: 649 - protein, 237 aa, Artificial Sequence
  chemically synthesized
MAPVQLLGLLVLFLPAMRCEIVLTQSPLSLPVTPGEPASISCRASKGVSTSGYSYLHWYLQKPGQSPQLLIYLASYLESGVPDRFSGSGSGTDFTLKISRVEAEDVGVYYCQHSRDLPLTFGQGTKLEIKRTVAAPSVFIFPPSDEQLKSGTASVVCLLNNFYPREAKVQWKVDNALQSGNSQESVTEQDSKDSTYSLSSTLTLSKADYEKHKVYACEVTHQGLSSPVTKSFNRGEC

SEQ ID NO: 650 - protein, 218 aa, Artificial Sequence
  chemically synthesized
EIVLTQSPLSLPVTPGEPASISCRASKGVSTSGYSYLHWYLQKPGQSPQLLIYLASYLESGVPDRFSGSGSGTDFTLKISRVEAEDVGVYYCQHSRDLPLTFGQGTKLEIKRTVAAPSVFIFPPSDEQLKSGTASVVCLLNNFYPREAKVQWKVDNALQSGNSQESVTEQDSKDSTYSLSSTLTLSKADYEKHKVYACEVTHQGLSSPVTKSFNRGEC

SEQ ID NO: 651 - protein, 237 aa, Artificial Sequence
  chemically synthesized
MAPVQLLGLLVLFLPAMRCDIVMTQTPLSLPVTPGEPASISCRASKGVSTSGYSYLHWYLQKPGQSPQLLIYLASYLESGVPDRFSGSGSGTAFTLKISRVEAEDVGLYYCQHSRDLPLTFGQGTKLEIKRTVAAPSVFIFPPSDEQLKSGTASVVCLLNNFYPREAKVQWKVDNALQSGNSQESVTEQDSKDSTYSLSSTLTLSKADYEKHKVYACEVTHQGLSSPVTKSFNRGEC

SEQ ID NO: 652 - protein, 218 aa, Artificial Sequence
  chemically synthesized
DIVMTQTPLSLPVTPGEPASISCRASKGVSTSGYSYLHWYLQKPGQSPQLLIYLASYLESGVPDRFSGSGSGTAFTLKISRVEAEDVGLYYCQHSRDLPLTFGQGTKLEIKRTVAAPSVFIFPPSDEQLKSGTASVVCLLNNFYPREAKVQWKVDNALQSGNSQESVTEQDSKDSTYSLSSTLTLSKADYEKHKVYACEVTHQGLSSPVTKSFNRGEC

SEQ ID NO: 653 - protein, 10 aa, Artificial Sequence
  chemically synthesized
GFTFSGYAMS

SEQ ID NO: 654 - protein, 10 aa, Artificial Sequence
  chemically synthesized
GYTFTDYYMD

SEQ ID NO: 655 - protein, 10 aa, Artificial Sequence
  chemically synthesized
GFTFSNYAMS

SEQ ID NO: 656 - protein, 10 aa, Artificial Sequence
  chemically synthesized
GFSFSSYDMS

SEQ ID NO: 657 - protein, 10 aa, Artificial Sequence
  chemically synthesized
GFTFSSYGMS

SEQ ID NO: 658 - protein, 10 aa, Artificial Sequence
  chemically synthesized
YISNSGGNAH

SEQ ID NO: 659 - protein, 10 aa, Artificial Sequence
  chemically synthesized
YIYPKNGGSS

SEQ ID NO: 660 - protein, 10 aa, Artificial Sequence
  chemically synthesized
YISNGGGDTH

SEQ ID NO: 661 - protein, 10 aa, Artificial Sequence
  chemically synthesized
TISGGGRYTY

SEQ ID NO: 662 - protein, 10 aa, Artificial Sequence
  chemically synthesized
TISGGGRDIY

SEQ ID NO: 663 - protein, 10 aa, Artificial Sequence
  chemically synthesized
YISNSGGNTH

SEQ ID NO: 664 - protein, 10 aa, Artificial Sequence
  chemically synthesized
EDYGTSPFVY

SEQ ID NO: 665 - protein, 7 aa, Artificial Sequence
  chemically synthesized
KVVATDY

SEQ ID NO: 666 - protein, 10 aa, Artificial Sequence
  chemically synthesized
ENYGTSPFVY

SEQ ID NO: 667 - protein, 7 aa, Artificial Sequence
  chemically synthesized
NYYGFDY

SEQ ID NO: 668 - protein, 7 aa, Artificial Sequence
  chemically synthesized
LYLGFDY

SEQ ID NO: 669 - protein, 15 aa, Artificial Sequence
  chemically synthesized
RASESVDNYGISFMN

SEQ ID NO: 670 - protein, 16 aa, Artificial Sequence
  chemically synthesized
KSSQSLLYSSNQKNYL

SEQ ID NO: 671 - protein, 11 aa, Artificial Sequence
  chemically synthesized
KASQDVGTAVA

SEQ ID NO: 672 - protein, 11 aa, Artificial Sequence
  chemically synthesized
LASQTIGTWLA

SEQ ID NO: 673 - protein, 15 aa, Artificial Sequence
  chemically synthesized
RASESVDNYGISFMN

SEQ ID NO: 674 - protein, 15 aa, Artificial Sequence
  chemically synthesized
RASESVDQYGISFMN

SEQ ID NO: 675 - protein, 15 aa, Artificial Sequence
  chemically synthesized
RASESVDSYGISFMN

SEQ ID NO: 676 - protein, 15 aa, Artificial Sequence
  chemically synthesized
RASESVDAYGISFMN

SEQ ID NO: 677 - protein, 17 aa, Artificial Sequence
  chemically synthesized
KSSQSLLYSSNQKNYLA

SEQ ID NO: 678 - protein, 7 aa, Artificial Sequence
  chemically synthesized
AASNQGS

SEQ ID NO: 679 - protein, 7 aa, Artificial Sequence
  chemically synthesized
WASIRES

SEQ ID NO: 680 - protein, 7 aa, Artificial Sequence
  chemically synthesized
WASTRHT

SEQ ID NO: 681 - protein, 7 aa, Artificial Sequence
  chemically synthesized
AATSLAD

SEQ ID NO: 682 - protein, 7 aa, Artificial Sequence
  chemically synthesized
AASDQGS

SEQ ID NO: 683 - protein, 9 aa, Artificial Sequence
  chemically synthesized
QQSKDVPWT

SEQ ID NO: 684 - protein, 9 aa, Artificial Sequence
  chemically synthesized
QQCDSYPWT

SEQ ID NO: 685 - protein, 9 aa, Artificial Sequence
  chemically synthesized
QQYSSYPWT

SEQ ID NO: 686 - protein, 9 aa, Artificial Sequence
  chemically synthesized
QQLYSIPWT

SEQ ID NO: 687 - protein, 9 aa, Artificial Sequence
  chemically synthesized
QQSDSYPWT

SEQ ID NO: 688 - protein, 5 aa, Artificial Sequence
  chemically synthesized
NYGMH

SEQ ID NO: 689 - protein, 5 aa, Artificial Sequence
  chemically synthesized
NYGFH

SEQ ID NO: 690 - protein, 5 aa, Artificial Sequence
  chemically synthesized
NSGMH

SEQ ID NO: 691 - protein, 7 aa, Artificial Sequence
  chemically synthesized
RSSFFWG

SEQ ID NO: 692 - protein, 5 aa, Artificial Sequence
  chemically synthesized
SYGFH

SEQ ID NO: 693 - protein, 7 aa, Artificial Sequence
  chemically synthesized
RSSYFWG

SEQ ID NO: 694 - protein, 17 aa, Artificial Sequence
  chemically synthesized
VIWYDGSNKYYADSVKG

SEQ ID NO: 695 - protein, 17 aa, Artificial Sequence
  chemically synthesized
VIWYDGSKKYYADSVKG

SEQ ID NO: 696 - protein, 17 aa, Artificial Sequence
  chemically synthesized
LIWYDGSNKYYADSVKG

SEQ ID NO: 697 - protein, 17 aa, Artificial Sequence
  chemically synthesized
VIWYDGSKRYYADSVKG

SEQ ID NO: 698 - protein, 16 aa, Artificial Sequence
  chemically synthesized
SIYYSGSTYYNPSLKS

SEQ ID NO: 699 - protein, 16 aa, Artificial Sequence
  chemically synthesized
SIFYSGETYFNPSLKS

SEQ ID NO: 700 - protein, 4 aa, Artificial Sequence
  chemically synthesized
NDDY

SEQ ID NO: 701 - protein, 4 aa, Artificial Sequence
  chemically synthesized
GDDY

SEQ ID NO: 702 - protein, 4 aa, Artificial Sequence
  chemically synthesized
NVDH

SEQ ID NO: 703 - protein, 11 aa, Artificial Sequence
  chemically synthesized
DYDILTGDEDY

SEQ ID NO: 704 - protein, 11 aa, Artificial Sequence
  chemically synthesized
RASQSVSSYLA

SEQ ID NO: 705 - protein, 11 aa, Artificial Sequence
  chemically synthesized
RASQGISSWLA

SEQ ID NO: 706 - protein, 7 aa, Artificial Sequence
  chemically synthesized
DASNRAT

SEQ ID NO: 707 - protein, 7 aa, Artificial Sequence
  chemically synthesized
DTSNRAT

SEQ ID NO: 708 - protein, 7 aa, Artificial Sequence
  chemically synthesized
AASNLRS

SEQ ID NO: 709 - protein, 7 aa, Artificial Sequence
  chemically synthesized
AASSLQS

SEQ ID NO: 710 - protein, 9 aa, Artificial Sequence
  chemically synthesized
QQRSNWPLT

SEQ ID NO: 711 - protein, 9 aa, Artificial Sequence
  chemically synthesized
QQSSNWPRT

SEQ ID NO: 712 - protein, 9 aa, Artificial Sequence
  chemically synthesized
QQYYSYPRT

SEQ ID NO: 713 - protein, 5 aa, Artificial Sequence
  chemically synthesized
SYYLY

SEQ ID NO: 714 - protein, 5 aa, Artificial Sequence
  chemically synthesized
NYYMY

SEQ ID NO: 715 - protein, 17 aa, Artificial Sequence
  chemically synthesized
GVNPSNGGTNFSEKFKS

SEQ ID NO: 716 - protein, 17 aa, Artificial Sequence
  chemically synthesized
GINPSNGGTNFNEKFKN

SEQ ID NO: 717 - protein, 11 aa, Artificial Sequence
  chemically synthesized
RDSNYDGGFDY

SEQ ID NO: 718 - protein, 11 aa, Artificial Sequence
  chemically synthesized
RDYRFDMGFDY

SEQ ID NO: 719 - protein, 15 aa, Artificial Sequence
  chemically synthesized
RASKSVSTSGFSYLH

SEQ ID NO: 720 - protein, 15 aa, Artificial Sequence
  chemically synthesized
RASKGVSTSGYSYLH

SEQ ID NO: 721 - protein, 7 aa, Artificial Sequence
  chemically synthesized
LASNLES

SEQ ID NO: 722 - protein, 7 aa, Artificial Sequence
  chemically synthesized
LASYLES

SEQ ID NO: 723 - protein, 9 aa, Artificial Sequence
  chemically synthesized
QHSWELPLT

SEQ ID NO: 724 - protein, 9 aa, Artificial Sequence
  chemically synthesized
QHSRDLPLT

SEQ ID NO: 725 - protein, 112 aa, Artificial Sequence
  chemically synthesized
DIVLTQSPTSLAVSLGQRATISCRASESVDNSGISFMNWFQQKPGQPPKLLIYAASNPGSGVPARFSGSGSGTDFSLNIHPMEEDDTAMYFCQQSKEVPWTFGGGTELEIKR

SEQ ID NO: 726 - protein, 118 aa, Artificial Sequence
  chemically synthesized
DVQLQESGPGLVKPSQSLSLTCTVTGYSITSDYAWNWIRQFPGNKLEWMGYINYSGSTSYNPSLKSRISITRDTSKNQFFLQLNSVTTEDTATYYCARWIGSSAWYFDVWGAGTTVTV

SEQ ID NO: 727 - protein, 112 aa, Artificial Sequence
  chemically synthesized
DVLMTQTPLSLPVSLGDQASISCRSGQNIVHSNGNTYLEWYLQKPGQSPKLLIYKVSNRFFGVPDRISGSGSGTDFTLKISRVEAEDLGVYFCFQGSHVPFTFGSGTKLEIK

SEQ ID NO: 728 - protein, 118 aa, Artificial Sequence
  chemically synthesized
QVQLQQPGAELVKPGASVKLSCKASGYTFTTYYLYWVRQRPGQGLEWIGGINPSNGGTNFNEKFKSKATLTVDKSSSTAYMQLNSLTSEDSAVYYCTRRDYRYDRGFDYWGQGTSVTV

SEQ ID NO: 729 - protein, 111 aa, Artificial Sequence
  chemically synthesized
DIVLTQSPASLAVSLGQRATISCRASKSVSTSGFNYIHWYQQKPGQPPKLLIYLASNLESGVPARFSGSGSGTDFTLNIHPVEDEDAATYYCQHSRELPLTFGAGTKLEIK

SEQ ID NO: 730 - protein, 118 aa, Artificial Sequence
  chemically synthesized
QVQLQQSGAELVKPGASVKMSCKAFGYTFTTYPIEWMKQNHGKSLEWIGNFHPYNDDTKYNEKFKGKAKLTVEKSSTTVYLELSRLTSDDSAVYYCARENYGSHGGFVYWGQGTLVTV

SEQ ID NO: 731 - protein, 108 aa, Artificial Sequence
  chemically synthesized
ENVLTQSPAIMSASPGEKVTMTCRASSSVISSYLHWYQQKSGASPKLWIYSTSNLASGVPDRFSGSGSGTSYSLTISSVEAEDAATYYCQQYNGYPLTFGAGTKLEIK

SEQ ID NO: 732 - protein, 434 aa, Artificial Sequence
  chemically synthesized
LFTVTVPKELYIIEHGSNVTLECNFDTGSHVNLGAITASLQKVENDTSPHRERATLLEEQLPLGKASFHIPQVQVRDEGQYQCIIIYGVAWDYKYLTLKVKASYRKINTHILKVPETDEVELTCQATGYPLAEVSWPNVSVPANTSHSRTPEGLYQVTSVLRLKPPPGRNFSCVFWNTHVRELTLASIDLQSQMEPRTHPTWEPKSCDKTHTCPPCPAPELLGGPSVFLFPPKPKDTLMISRTPEVTCVVVDVSHEDPEVKFNWYVDGVEVHNAKTKPREEQYNSTYRVVSVLTVLHQDWLNGKEYKCKVSNKALPAPIEKTISKAKGQPREPQVYTLPPSRDELTKNQVSLTCLVKGFYPSDIAVEWESNGQPENNYKTTPPVLDSDGSFFLYSKLTVDKSRWQQGNVFSCSVMHEALHNHYTQKSLSLSPGK

SEQ ID NO: 733 - protein, 119 aa, Artificial Sequence
  chemically synthesized
EVQLVQSGAEVKKPGASVKVSCKASGYRFTSYGISWVRQAPGQGLEWMGWISAYNGNTNYAQKLQGRVTMTTDTSTNTAYMELRSLRSDDTAVYYCARDADYSSGSGYWGQGTLVTVSS

SEQ ID NO: 734 - protein, 119 aa, Artificial Sequence
  chemically synthesized
QVQLVQSGAEVKKPGASVRVSCKASGYTLTSYYIHWVRQAPGQGLEWMGIINPRGATISYAQKFQGRVTMTRDTSTSTVYMELRNLKSEDTALYYCATAGIYGFDFDYWGRGTLVTVSS

SEQ ID NO: 735 - protein, 127 aa, Artificial Sequence
  chemically synthesized
QVQLQESGPGLVKPSQTLSLTCTVSGGSISSGAYYWSWIRQHPGKGLEWIGYIYYNGNTYYNPSLRSLVTISVDASKNQFSLKLSSVTAADTAVYYCARASDYVWGGYRYMDAFDIWGRGTLITVSS

SEQ ID NO: 736 - protein, 125 aa, Artificial Sequence
  chemically synthesized
GAHSEVQLVQSGGGVVQPGRSLRLSCAASGFTFSSYWCDRMSWVRQAPGKGLEWVSAISGSGGSTYYADSVKGRFTISRDNSKNTLYLQMNSLRAEDTAVYYCAKENWGSYFDLWGQGTTVTVSS

SEQ ID NO: 737 - protein, 108 aa, Artificial Sequence
  chemically synthesized
SYELTQPPSVSVSPGQTARITCSGDALPKQYAYWYQQKPGQAPVMVIYKDTERPSGIPERFSGSSSGTKVTLTISGVQAEDEADYYCQSADNSITYRVFGGGTKVTVL

SEQ ID NO: 738 - protein, 111 aa, Artificial Sequence
  chemically synthesized
QSALTQPASVSGSPGQSITISCTGTSNDVGGYNYVSWYQHHPGKAPKLIIYDVTNRPSGVSDRFSGSKSGNTASLTISGLLAEDEGDYYCSSYTIVTNFEVLFGGGTKLTV

SEQ ID NO: 739 - protein, 112 aa, Artificial Sequence
  chemically synthesized
QSVLTQPPSASGTPGQRVTISCSGSNSNIGSNSVNWYQQLPGTAPKLLIYGNNQRPSGVPDRFSGSKSGTSASLAISGLQSENEADYYCAAWDDSLNGPVFGRGTKVTVLGE

SEQ ID NO: 740 - protein, 112 aa, Artificial Sequence
  chemically synthesized
GVHSDIVMTQSPSTLSASVGDRVTITCRASQGISSWLAWYQQKPGRAPKVLIYKASTLESGVPSRFSGSGSGTDFTLTISSLQPEDFATYYCQQSYSTPWTFGQGTKLEIKR

SEQ ID NO: 741 - protein, 121 aa, Artificial Sequence
  chemically synthesized
QVQLVQSGHEVKQPGASVKMSCKASGYSFTSSWIHWVKQAPGQGLEWIGYIYPSTGFTEYNQKFKDRATLTADKSTSTAYMELSSLRSEDTAVYYCARWRDSSGYHAMDYWGQGTLVTVSS

SEQ ID NO: 742 - protein, 121 aa, Artificial Sequence
  chemically synthesized
QVQLVQSGHEVKQPGASVKMSCKASGYSFTSSWIHWVRQAPGQGLEWIGYIYPSTGFTEYNQKFKDRATLTADKSTSTAYMELSSLRSEDTAVYYCARWRDSSGYHAMDYWGQGTLVTVSS

SEQ ID NO: 743 - protein, 111 aa, Artificial Sequence
  chemically synthesized
EIVLTQSPATLSLSPGQRLTISCRASQSVSTSGYSYMHWYQQKPDQSPKLLIKFGSNLESGIPARFSGSGSGTDFTLTISSLEPEDFATYYCQHSWEIPYTFGQGTKLEIK

SEQ ID NO: 744 - protein, 111 aa, Artificial Sequence
  chemically synthesized
DIVLTQSPATLSLSPGQRLTISCRASQSVSTSGYSYMHWYQQKPDQSPKLLIKFGSNLESGIPARFSGSGSGTDFTLTISSLEPEDFAVYYCQHSWEIPYTFGQGTKLEIK

SEQ ID NO: 745 - protein, 125 aa, Artificial Sequence [sequence omitted]

SEQ ID NO: 746 - protein, 112 aa, Artificial Sequence [sequence omitted]

SEQ ID NO: 747 - protein, 161 aa, Artificial Sequence
  chemically synthesized
MGLGLQWVFFVALLKGVHCEVRLLESGGGLVKPEGSLKLSCVASGFTFSDYFMSWVRQAPGKGLEWVAHIYTKSYNYATYYSGSVKGRFTISRDDSRSMVYLQMNNLRTEDTATYYCTRDGSGYPSLDFWGQGTQVTVSSATTTAPSVYPLAPACDSTTKS

SEQ ID NO: 748 - protein, 214 aa, Artificial Sequence; identical to SEQ ID NO: 543
  chemically synthesized

SEQ ID NO: 749 - protein, 551 aa, Artificial Sequence
  chemically synthesized
METDTLLLWVLLLWVPGSTGDAAQPARRARRTKLGTELGSPGLQEFEVRLLESGGGLVKPEGSLKLSCVASGFTFSDYFMSWVRQAPGKGLEWVAHIYTKSYNYATYYSGSVKGRFTISRDDSRSMVYLQMNNLRTEDTATYYCTRDGSGYPSLDFWGQGTQVTVSSGGGGSDIQMTQSPSSLPASLGDRVTINCQASQDISNYLNWYQQKPGKAPKLLIYYTNKLADGVPSRFSGSGSGRDSSFTISSLESEDIGSYYCQQYYNYPWTFGPGTKLEIKGGGGSGGGGSGGGGSEVQLVESGGGLVQPGKSLKLSCEASGFTFSGYGMHWVRQAPGRGLESVAYITSSSINIKYADAVKGRFTVSRDNAKNLLFLQMNILKSEDTAMYYCARFDWDKNYWGQGTMVTVSSGGGGSYELTQPPSASVNVGETVKITCSGDQLPKYFADWFHQRSDQTILQVIYDDNKRPSGIPERISGSSSGTTATLTIRDVRAEDEGDYYCFSGYVDSDSKLYVFGSGTQLTVLGPRGGPEQKLISEEDLNSAVDHHHHHH

SEQ ID NO: 750 - protein, 117 aa, Artificial Sequence
  chemically synthesized
QLVQSGAEVKKPGASVKVSCKASGYTFTSYGISWVRQAPGQGLEWMGWISAYNGNTNYAQKLQGRVTMTTDTSTSTATMELRSLRSDDTAVYYCARGRGYSYGIDAFDIWGQGTMVT

SEQ ID NO: 751 - protein, 112 aa, Artificial Sequence
  chemically synthesized
LSYVLTQPPSVSVSPGQTARITCSGDALPKQYAYWYQQKPGQAPVLVIYKDSERPSGIPERFSGSSSGTTVTLTISGVQAEDEADYYCQSADSSGTYVVFGGGTKLTVLGQP

SEQ ID NO: 752 - protein, 121 aa, Artificial Sequence
  chemically synthesized
QVQLQQSGPGLVRPSQTLSLSCDISGDSVSSNSATWNWIRQSPSRGLEWLGRTFYRSKWYHDYALSVKSRITINPDTSKNQFSLQLNSVSPGDTAVYFCVREDIDGRLDYWGQGTLVTVSS

SEQ ID NO: 753 - protein, 119 aa, Artificial Sequence
  chemically synthesized
QVQLVQSGSELKKPGASVKISCKASGYIFSDNGVNWVRQAPGQGLEWMGWINTKIGNPTYAQGFTGRFVFSLDTSVSTTYLQISSLQAGDTAVYYCAREHDYYYGMDVWGQGTTVTVSS

SEQ ID NO: 754 - protein, 122 aa, Artificial Sequence
  chemically synthesized
MAEVQLLESGAEVKKPGASVKVSCKASGYTFTSHYMHWVRQAPGQGLEWMGVINPSGGSTSYAQKFQGRVTMTRDTSTSTVYMDLSSLRSEDTAVYYCARRSEAYYHGMDVWGQGTTVTVSS

SEQ ID NO: 755 - protein, 119 aa, Artificial Sequence
  chemically synthesized
EVQLVQSGSELKKPGASVKISCKASGYIFSDNGVNWVRQAPGQGLEWMGWINTKIGNPTYAQGFTGRFVFSLDTSISTTYLQISSLQAGDTAVYYCAREHDYYYGMDVWGQGTTVTVSS

SEQ ID NO: 756 - protein, 131 aa, Artificial Sequence
  chemically synthesized
QVQLVESGGGLVQPGGSLRLSCEATGFTFSRYWMHWVRQAPGKGLEWVSSISSSSSYIYYADSVKGRFTISRDNAKNSLYLQMNSLRAEDTAVYYCARDTLEYYGSGILENAMGYYGMDVWGQGTTVTVSS

SEQ ID NO: 757 - protein, 119 aa, Artificial Sequence
  chemically synthesized
EVQLVESGGGLVRPGGSLRLACAASGFSFSDYYMTWIRQAPGRGLEWIAYISDSGQTVHYADSVKGRFTISRDNTKNSLFLQVNTLRAEDTAVYYCAREDLLGYYLQSWGQGTLVTVSS

SEQ ID NO: 758 - protein, 118 aa, Artificial Sequence
  chemically synthesized
EVQLVESGGGVVQPGRSLRLSCAASGFTFSSYWMSWVRQAPGKGLEWVANIKQDGSEKYYVDSVKGRFTISRDNAKNSLYLQMNSLRAEDTAVYYCAREGEHDAFDIWGQGTMVTVSS

SEQ ID NO: 759 - protein, 119 aa, Artificial Sequence; identical to SEQ ID NO: 753
  chemically synthesized

SEQ ID NO: 760 - protein, 119 aa, Artificial Sequence; identical to SEQ ID NO: 753
  chemically synthesized

SEQ ID NO: 761 - protein, 120 aa, Artificial Sequence
  chemically synthesized
QVQLVQSGAEVKKPGASVKVSCKASGYTFTRYTMHWVRQAPGQRLEWMGWINAGNGNTKYSQKFQGRVTITRDTSASTAYMELSSLRSEDTAVYYCAKVSAGTESWFDPWGQGTLVTVSS

SEQ ID NO: 762 - protein, 117 aa, Artificial Sequence
  chemically synthesized
QVQLVQSGAEVKKPGASVKVSCKASGYTFTSYGISWVRQAPGQGLEWMGWISAYNGNTNYAQKLQGRVTMTTDTSTSTAYMELRSLRSDDTAVYYCARGLYGDEDYWGQGTLVTVSS

SEQ ID NO: 763 - protein, 119 aa, Artificial Sequence
  chemically synthesized
QVQLVQSGSELKKPGASVKISCKASGYIFSDNGVNWVRQAPGQGLEWMGWINTKIGNPTYAQGFTGRFVFSLDTSISTTYLQISSLQAGDTAVYYCAREHDYYYGMDVWGQGTTVTVSS

SEQ ID NO: 764 - protein, 125 aa, Artificial Sequence
  chemically synthesized
QMQLVQSGAEVKKPGESLKISCKGSGYSFTSYWIGWVRQMPGKGLEWMGIIYPGDSDTRYSPSFQGQVTISADKSISTAYLQWSSLKASDTAMYYCASGVTRKRYSSSWPPFDYWGQGTLVTVSS

SEQ ID NO: 765 - protein, 120 aa, Artificial Sequence
  chemically synthesized
QVQLQQWGAGLLKSSETLSLSCAVYGGTFRDDHWSWIRQPPGKGLEWIGESHHTGRTIYNPSLRSRVTMSIDTSKNEFSLILRSVTAADTATYFCARGNNYVWGNQEDFWGQGTLVTVSS

SEQ ID NO: 766 - protein, 121 aa, Artificial Sequence; identical to SEQ ID NO: 752
  chemically synthesized

SEQ ID NO: 767 - protein, 123 aa, Artificial Sequence
  chemically synthesized
EVQLVESGGALVQPGGSLRLSCAVSGFTFSDHYMDWVRQAPGKGLEWVARSRNKGNSYTTEYAASVRGRFTISRDDSKNSLYLQMNSLKTEDTAVYYCVRVGVVPALDGMDVWGQGTTVTVSS

SEQ ID NO: 768 - protein, 131 aa, Artificial Sequence
  chemically synthesized
EVQLVESGGGLVQPGGSLRLSCAASGFTFSSYWMHWVRQAPGKGLEWVSSISSSSSYIYYADSVKGRFTISRDNAKNSLYLQMNSLRAEDTAVYYCARDTLEYYGSGILENAMGYYGMDVWGQGTTVTVSS

SEQ ID NO: 769 - protein, 123 aa, Artificial Sequence
  chemically synthesized
EVQLLESGGGVVQTGRSLRLSCSDSGSTFRSQAMHWVRQTPGKGLEWLAVTSHDGSKTYYADSVKGRFTISRDNSKNTLYLQMNSLRGEDTAVYYCARGGRGYTYDHSFFDYWGQGTLVTVSS

SEQ ID NO: 770 - protein, 119 aa, Artificial Sequence
  chemically synthesized
QVQLVQSGSELKKPGASVKISCKASGYIFSDNGVNWVRQAPGQGLEWMGWINTKDGNPTYAQGFTGRFVFSLDTSISTTYLQISSLQAGDTAVYYCAREHDYYYGMDVWGQGTTVTVSS

SEQ ID NO: 771 - protein, 119 aa, Artificial Sequence
  chemically synthesized
QVQLVQSGSELKKPGASVKISCKASGYIFSDNGVNWVRQAPGQGLEWMGWINTKTGNPTYAQGFTGRFVFSLDTSISTTYLQISSLQAGDTAVYYCAREHDYYYGMDVWGQGTTVTVSS

SEQ ID NO: 772 - protein, 119 aa, Artificial Sequence
  chemically synthesized
QVQLVQSGSELKKPGASVKISCKASGYTFSDNGVNWVRQAPGQGLEWMGWINTKDGNPTYAQGFTGRFVFSLDTSISTTYLQISSLQAGDTAVYYCAREHDYYYGMDVWGQGTTVTVSS

SEQ ID NO: 773 - protein, 118 aa, Artificial Sequence
  chemically synthesized
QVQLVQSGSELKKPGASVKISCKASGYTFSDNGVNWVRQAPGQGLEWMGWINTKTGNPTYAQGFTGRFVFSLDTSISTTYLQISSLQAGDTAVYYCAREHDYYYGMDVWGQGTTVTVS

SEQ ID NO: 774 - protein, 119 aa, Artificial Sequence
  chemically synthesized
QVQLVQSGSELKKPGASVKISCKASGYKFSDNGVNWVRQAPGQGLEWMGWINTKSGNPTYAQGFTGRFVFSLDTSISTTYLQISSLQAGDTAVYYCAREHDYYYGMDVWGQGTTVTVSS

SEQ ID NO: 775 - protein, 119 aa, Artificial Sequence
  chemically synthesized
QVQLVQSGSELKKPGASVKISCKASGYTFSDNGVNWVRQAPGQGLEWMGWINTKSGNPTYAQGFTGRFVFSLDTSISTTYLQISSLQAGDTAVYYCAREHDYYYGMDVWGQGTTVTVSS

SEQ ID NO: 776 - protein, 119 aa, Artificial Sequence
  chemically synthesized
QVQLVQSGSELKKPGASVKISCKASGYKFSDNGVNWVRQAPGQGLEWMGWINTKDGNPTYAQGFTGRFVFSLDTSISTTYLQISSLQAGDTAVYYCAREHDYYYGMDVWGQGTTVTVSS

SEQ ID NO: 777 - protein, 111 aa, Artificial Sequence
  chemically synthesized
LPVLTQPASVSGSPGQSITISCTGTSSDVGGYNYVSWYQQHPGKAPKLMIYEVSKRPSGVPDRFSGSKSGNTASLTVSGLQAEDEADYYCSAWDDSLNADVFGGGTKLTVL

SEQ ID NO: 778 - protein, 110 aa, Artificial Sequence
  chemically synthesized
QPVLTQPPSASGTPGQRVTISCSGSSSNIGTNTVNWYQQVPGTAPKLLIHGNDQRPSGVPDRFSGSKSDTSASLAITGLQSDDDADYYCSAWDDSLNADVFGGGTKLTVL

SEQ ID NO: 779 - protein, 110 aa, Artificial Sequence
  chemically synthesized
QAVLTQPPSASATPGQRVTISCSGSDSNIGTNYVYWYQQFPGTAPQPLIYRDNQRPSGVPDRFSGSKSGTSASLAISGLRSEDEATYFCSTWDDSLNGWVFGGGTKLTVL

SEQ ID NO: 780 - protein, 111 aa, Artificial Sequence
  chemically synthesized
QPVLTQPRSVSGSPGQSITTSCTGTSSDVGGYNYVSWYQQHPGKAPKLMIYEVSNRPSGVSNRFSGSKSGNTASLTISGLQAEDEADYYCSSYTSSSTLEVFGTGTKVTVL

SEQ ID NO: 781 - protein, 110 aa, Artificial Sequence
  chemically synthesized
YELMQPPSVSGAPGQRVTISCTGSSSNIGAAYDVHWYQQLPGKAPKLVMFANSNRPSGVPDRFSGSKSGTSASLAITGLQAEDEADYYCQSYDISLRAYVFGTGTKLTVL

SEQ ID NO: 782 - protein, 110 aa, Artificial Sequence
  chemically synthesized
SYELMQPPSASGTPGQRVTISCSGSSSNIGTNTVNWYQHLPGTAPKLLIYSNNQRPSGVPDRFSGSKSGTSASLAISGLQSEDEADYYCATWDDSPNGWVFGGGTKLTVL

SEQ ID NO: 783 - protein, 109 aa, Artificial Sequence
  chemically synthesized
QAVLTQPPSVSAAPGQRVTISCSGSNSNIADTYVSWYQQLPGTAPRLLIYDNDQRPSGIPDRFSGSKSGTSATLGITGLQTGDEADYYCGTWDSSLSGVFGTGTKVTVL

SEQ ID NO: 784 - protein, 109 aa, Artificial Sequence
  chemically synthesized
QSVLTQPASVSGSPGQSVTISCTGSSSDVGAYNFVSWYRQYPGKAPKLLIYEVNKRPSDVPDRFSGSKFGNTASLTVSGLQADDEADYYCSSYAGSTDVFGTGTKVTVL

SEQ ID NO: 785 - protein, 110 aa, Artificial Sequence
  chemically synthesized
LPVLTQPPSVSGTPGQRVTISCSGSSSNIGSNTVNWYQQLPGTAPKLLIYTNNQRPSGVPDRFSGSKSGTSASLAISGLQSEDEADYYCAAWDESLNGDVFGTGTKVTVL

SEQ ID NO: 786 - protein, 107 aa, Artificial Sequence
  chemically synthesized
AIRMTQSPSFLSASVGDRVTITCRTSQNIYNYLNWYQQKPGKAPELLIFVASSLQSGVPSRFSGSGSGTDFTLTISSLQPEDFATYFCLQDHSYPYTFGQGTKVEIK

SEQ ID NO: 787 - protein, 110 aa, Artificial Sequence
  chemically synthesized
LPVLTQPPSVSEVPGQRVTISCSGGISNIGSNAVNWYQHFPGKAPKLLIYYNDLLPSGVSDRFSASKSGTSASLAISGLRSEDEADYYCAAWDDNLSAYVFATGTKVTVL

SEQ ID NO: 788 - protein, 111 aa, Artificial Sequence
  chemically synthesized
QSALTQPPSASGSPGQSVTISCTGTSSDVGGYNYVSWYQHHPGKAPKLMIYEVSKRPSGVPDRFSGSKSAITASLTISGLLTEDEADYYCSAWDDSLNADVFGGGTKVTVL

SEQ ID NO: 789 - protein, 107 aa, Artificial Sequence
  chemically synthesized
DIQMTQSPSSLSASVGDRVTITCRASQSISTYLNWYQQKPGKAPKVLITDASSLETGVPSRFSGSGSGTDFTFTISSLQPEDTATYFCQQYDDLPPTFGQGTKLEIK

SEQ ID NO: 790 - protein, 110 aa, Artificial Sequence
  chemically synthesized
QAGLTQPRSVSGSPGQSVTISCTGTSSDVGGYNYVSWYQQHPGKAPKLMIYDVTKRPSGVSNRFSGSKSGNTASLTISGLQAEDEADYYCSSYTSSSTYVFGTGTKVTVL

SEQ ID NO: 791 - protein, 111 aa, Artificial Sequence
  chemically synthesized
QPVLTQPASVSGSPGQSITISCTGTSSDVGGYNYVSWYQQHPGKAPKLMIYDVSNRPSGVSNRFSGSKSGNTASLAITGLQSDDDADYYCSAWDDSLNADVFGGGTKLTVL

SEQ ID NO: 792 - protein, 110 aa, Artificial Sequence
  chemically synthesized
QAGLTQPPSVSKGLRQTATLTCTGNSNNIGDQGAAWLQQHQGHPPRLLSYRNNNRPSGISERLSASRSGNIASLTITGLQPEDEADYYCSAWDSSLSVWVFGGGTKLTVL

SEQ ID NO: 793 - protein, 110 aa, Artificial Sequence
  chemically synthesized
QAVLTQPPSASGTPGQRVTISCSGSSSNIGSNTVNWYQQLPGTAPKLLIYSNNQRPSGVPDRFSGSKSGTSASLAISGLQSEDEADYYCAAWDDSLNGYVFGTGTKLTVL

SEQ ID NO: 794 - protein, 107 aa, Artificial Sequence
  chemically synthesized
AIRMTQSPSTLSASVGDRVTITCRASENIRNLLAWYQQKPGKAPELLIHGASTLGTGVPSRFSGGGSGTEFTLTISSLQPDDFATYYCQQYESYFNTFGQGTKVEIK

SEQ ID NO: 795 - protein, 118 aa, Artificial Sequence
  chemically synthesized
QVQLVESGPGVKKPGSSLKLSCTVSGFTFSSYDYYMHWVRQAPGNGLEWMAVIWYSGSNTYYNDSLKSRFSITRDNSKNTAYMQLNSLRAEDTAVYYCARAYFGVDVWGQGTLVTVSS

SEQ ID NO: 796 - protein, 113 aa, Artificial Sequence
  chemically synthesized
DIVMTQSPASLSVSVGDRATISCRASQGIGNTLAWYQQKPGQAPKRLLIYRASQGIGNTLAGVPARFSGDGDGTDFTLTIDDLEEPEDFATYYCQQYDHVPLTFGQGTKLEIK

SEQ ID NO: 797 - protein, 119 aa, Artificial Sequence
  chemically synthesized
EVQLVQSGAEVKKPGASVKVSCKAFGYTFTTYPIEWMRQAHGQGLEWIGNFHPYNDDTKYNEKFKGRVTMTVDKSTTTVYMELSSLRSEDTAVYYCARENYGSHGGFVYWGQGTLVTVS

SEQ ID NO: 798 - protein, 119 aa, Artificial Sequence
  chemically synthesized
EVQLVQSGAEVKKPGASVKVSCKAFGYTFTTYPIEWMRQAHGQGLEWIGNFHPYNDDTKYNEKFKGRVTMTRDTSTSTVYMELSSLRSEDTAVYYCARENYGSHGGFVYWGQGTLVTVS

SEQ ID NO: 799 - protein, 119 aa, Artificial Sequence
  chemically synthesized
EVQLVQSGAEVKKPGASVKVSCKAFGYTFTTYPIEWVRQAPGQGLEWMGNFHPYNDDTKYNEKFKGRVTMTRDTSTSTVYMELSSLRSEDTAVYYCARENYGSHGGFVYWGQGTLVTVS

SEQ ID NO: 800 - protein, 119 aa, Artificial Sequence
  chemically synthesized
EVQLVQSGAEVKKPGSSVKVSCKASGYTFTTYPIEWVRQAPGQGLEWMGNFHPYNDDTKYNEKFKGRVTITADKSTSTAYMELSSLRSEDTAVYYCARENYGSHGGFVYWGQGTLVTVS

SEQ ID NO: 801 - protein, 119 aa, Artificial Sequence
  chemically synthesized
EVQLVQSGAEVKKPGSSVKVSCKAFGYTFTTYPIEWMRQAHGQGLEWIGNFHPYNDDTKYNEKFKGRVTITVDKSTTTVYMELSSLRSEDTAVYYCARENYGSHGGFVYWGQGTLVTVS

SEQ ID NO: 802 - protein, 119 aa, Artificial Sequence
  chemically synthesized
EVQLVQSGAEVKKPGSSVKVSCKAFGYTFTTYPIEWMRQAHGQGLEWIGNFHPYNDDTKYNEKFKGRVTITADKSTSTAYMELSSLRSEDTAVYYCARENYGSHGGFVYWGQGTLVTVS

SEQ ID NO: 803 - protein, 108 aa, Artificial Sequence
  chemically synthesized
ENVLTQSPFSLSASVGDRVTITCRASSSVISSYLHWYQQKPAKAPKLWIYSTSNLASGVPDRFSGSGSGTSYTLTISSLQPEDFATYYCQQYNGYPLTFGGGTKVEIK

SEQ ID NO: 804 - protein, 108 aa, Artificial Sequence
  chemically synthesized
ENVLTQSPFSLSASVGDRVTITCRASSSVISSYLHWYQQKPAKAPKLFIYSTSNLASGVPSRFSGSGSGTDYTLTISSLQPEDFATYYCQQYNGYPLTFGGGTKVEIK

SEQ ID NO: 805 - protein, 108 aa, Artificial Sequence
  chemically synthesized
ENVLTQSPFSLSASVGDRVTITCRASSSVISSYLHWYQQKPAKAPKLWIYSTSNLASGVPDRFSGSGSGTSYTLTISSLQPEDFATYYCQQYNSYPLTFGGGTKVEIK

SEQ ID NO: 806 - protein, 108 aa, Artificial Sequence
  chemically synthesized
ENVMTQSPFSLSASVGDRVTITCRASSSVISSYLHWYQQKPAKAPKLFIYSTSNLASGVPSRFSGSGSGTDYTLTISSLQPEDFATYYCQQYNGYPLTFGGGTKVEIK

SEQ ID NO: 807 - protein, 108 aa, Artificial Sequence
  chemically synthesized
ENVMTQSPFSLSASVGDRVTITCRASSSVISSYLHWYQQKPAKAPKLFIYSTSNLASGVPSRFSGSGSGTDYTLTISSLQPEDFATYYCQQYNSYPLTFGGGTKVEIK

SEQ ID NO: 808 - protein, 108 aa, Artificial Sequence
  chemically synthesized
ENVLTQSPFSLSASVGDRVTITCRASSSVISSYLHWYQQKPAKAPKLFIYSTSNLASGVPSRFSGSGSGTDYTLTISSLQPEDFATYYCQQYNSYPLTFGGGTKVEIK

SEQ ID NO: 809 - protein, 108 aa, Artificial Sequence
  chemically synthesized
ENVLTQSPGTLSLSPGERATLSCRASSSVISSYLHWYQQKPGQAPRLWIYSTSNLASGVPDRFSGSGSGTSYTLTISRLEPEDFATYYCQQYNGYPLTFGGGTKVEIK

SEQ ID NO: 810 - protein, 108 aa, Artificial Sequence
  chemically synthesized
ENVLTQSPGTLSLSPGERATLSCRASSSVISSYLHWYQQKPGQAPRLWIYSTSNLASGVPDRFSGSGSGTSYTLTISRLEPEDFATYYCQQYNSYPLTFGGGTKVEIK

SEQ ID NO: 811 - protein, 13 aa, Artificial Sequence
  chemically synthesized
AASGFTFSSFGMS

SEQ ID NO: 812 - protein, 13 aa, Artificial Sequence
  chemically synthesized
KGSGYSFTDYALH

SEQ ID NO: 813 - protein, 13 aa, Artificial Sequence
  chemically synthesized
KASGYAFTSYNIY

SEQ ID NO: 814 - protein, 13 aa, Artificial Sequence
  chemically synthesized
AASGFTFSNYDMS

SEQ ID NO: 815 - protein, 13 aa, Artificial Sequence
  chemically synthesized
AASGFTFNSYGMS

SEQ ID NO: 816 - protein, 13 aa, Artificial Sequence
  chemically synthesized
KGSGYIFTDYVMH

SEQ ID NO: 817 - protein, 17 aa, Artificial Sequence
  chemically synthesized
TITGGGRNTYYPDSVKG

SEQ ID NO: 818 - protein, 16 aa, Artificial Sequence
  chemically synthesized
TISGGGSNTYYPDSVK

SEQ ID NO: 819 - protein, 15 aa, Artificial Sequence
  chemically synthesized
YIDLYNGDTSYNEKF

SEQ ID NO: 820 - protein, 15 aa, Artificial Sequence
  chemically synthesized
YISGGGGNTYYPDTL

SEQ ID NO: 821 - protein, 17 aa, Artificial Sequence
  chemically synthesized
TISGGGSYTYYPDSVQG

SEQ ID NO: 822 - protein, 17 aa, Artificial Sequence
  chemically synthesized
VISTYYSNINYNQKFKG

SEQ ID NO: 823 - protein, 11 aa, Artificial Sequence
  chemically synthesized
QGYDGYTWFAY

SEQ ID NO: 824 - protein, 9 aa, Artificial Sequence
  chemically synthesized
IYDVAWFAY

SEQ ID NO: 825 - protein, 11 aa, Artificial Sequence
  chemically synthesized
EGYGSLFYFDQ

SEQ ID NO: 826 - protein, 8 aa, Artificial Sequence
  chemically synthesized
EGRLSFDY

SEQ ID NO: 827 - protein, 9 aa, Artificial Sequence
  chemically synthesized
ISLTGIFDY

SEQ ID NO: 828 - protein, 9 aa, Artificial Sequence
  chemically synthesized
GNYVYVMDY

SEQ ID NO: 829 - protein, 12 aa, Artificial Sequence
  chemically synthesized
EGFGRPYWYFDV

SEQ ID NO: 830 - protein, 15 aa, Artificial Sequence
  chemically synthesized
RASESVDNSGISFMN

SEQ ID NO: 831 - protein, 16 aa, Artificial Sequence
  chemically synthesized
RSSQTIVHSDGNTYLE

SEQ ID NO: 832 - protein, 15 aa, Artificial Sequence
  chemically synthesized
RASESVDSYGNSFMN

SEQ ID NO: 833 - protein, 16 aa, Artificial Sequence
  chemically synthesized
RSSQSIVQSNGNTYLE

SEQ ID NO: 834 - protein, 16 aa, Artificial Sequence
  chemically synthesized
RSSQTIVHGNGNTYLE

SEQ ID NO: 835 - protein, 11 aa, Artificial Sequence
  chemically synthesized
QASENIYSSLA

SEQ ID NO: 836 - protein, 7 aa, Artificial Sequence
  chemically synthesized
AASNPGS

SEQ ID NO: 837 - protein, 7 aa, Artificial Sequence
  chemically synthesized
KVSNRFS

SEQ ID NO: 838 - protein, 7 aa, Artificial Sequence
  chemically synthesized
LASNLDS

SEQ ID NO: 839 - protein, 7 aa, Artificial Sequence
  chemically synthesized
SASTLAS

SEQ ID NO: 840 - protein, 9 aa, Artificial Sequence
  chemically synthesized
QQSKEVPWT

SEQ ID NO: 841 - protein, 9 aa, Artificial Sequence
  chemically synthesized
FQGSHVPYT

SEQ ID NO: 842 - protein, 9 aa, Artificial Sequence
  chemically synthesized
QQNNEVPLT

SEQ ID NO: 843 - protein, 9 aa, Artificial Sequence
  chemically synthesized
FQGSHVPYT

SEQ ID NO: 844 - protein, 12 aa, Artificial Sequence
  chemically synthesized
QQGFGTSNVENP

SEQ ID NO: 845 - protein, 11 aa, Artificial Sequence
  chemically synthesized
GYSITSDYAWN

SEQ ID NO: 846 - protein, 10 aa, Artificial Sequence
  chemically synthesized
GYTFTTYYLY

SEQ ID NO: 847 - protein, 16 aa, Artificial Sequence
  chemically synthesized
YINYSGSTSYNPSLKS

SEQ ID NO: 848 - protein, 16 aa, Artificial Sequence
  chemically synthesized
GINPSNGGTNFNEKFK

SEQ ID NO: 849 - protein, 11 aa, Artificial Sequence
  chemically synthesized
WIGSSAWYFDV

SEQ ID NO: 850 - protein, 11 aa, Artificial Sequence
  chemically synthesized
RDYRYDRGFDY

SEQ ID NO: 851 - protein, 16 aa, Artificial Sequence
  chemically synthesized
RSGQNIVHSNGNTYLE

SEQ ID NO: 852 - protein, 15 aa, Artificial Sequence
  chemically synthesized
RASKSVSTSGFNYIH

SEQ ID NO: 853 - protein, 7 aa, Artificial Sequence
  chemically synthesized
KVSNRFF

SEQ ID NO: 854 - protein, 7 aa, Artificial Sequence
  chemically synthesized
GYTFTTY

SEQ ID NO: 855 - protein, 9 aa, Artificial Sequence
  chemically synthesized
FQGSHVPFT

SEQ ID NO: 856 - protein, 9 aa, Artificial Sequence
  chemically synthesized
QHSRELPLT

SEQ ID NO: 857 - protein, 5 aa, Artificial Sequence
  chemically synthesized
SYGIS

SEQ ID NO: 858 - protein, 5 aa, Artificial Sequence
  chemically synthesized
SYYIH

SEQ ID NO: 859 - protein, 7 aa, Artificial Sequence
  chemically synthesized
SGAYYWS

SEQ ID NO: 860 - protein, 6 aa, Artificial Sequence
  chemically synthesized
SSYWMS

SEQ ID NO: 861 - protein, 17 aa, Artificial Sequence
  chemically synthesized
WISAYNGNTNYAQKLQG

SEQ ID NO: 862 - protein, 17 aa, Artificial Sequence
  chemically synthesized
IINPRGATISYAQKFQG

SEQ ID NO: 863 - protein, 16 aa, Artificial Sequence
  chemically synthesized
YIYYNGNTYYNPSLRS

SEQ ID NO: 864 - protein, 17 aa, Artificial Sequence
  chemically synthesized
AISGSGGSTYYADSVKG

SEQ ID NO: 865 - protein, 10 aa, Artificial Sequence
  chemically synthesized
DADYSSGSGY

SEQ ID NO: 866 - protein, 10 aa, Artificial Sequence
  chemically synthesized
AGIYGFDFDY

SEQ ID NO: 867 - protein, 17 aa, Artificial Sequence
  chemically synthesized
ASDYVWGGYRYMDAFDI

SEQ ID NO: 868 - protein, 9 aa, Artificial Sequence
  chemically synthesized
ENWGSYFDL

SEQ ID NO: 869 - protein, 11 aa, Artificial Sequence
  chemically synthesized
SGDALPKQYAY

SEQ ID NO: 870 - protein, 14 aa, Artificial Sequence
  chemically synthesized
TGTSNDVGGYNYVS

SEQ ID NO: 871 - protein, 13 aa, Artificial Sequence
  chemically synthesized
SGSNSNIGSNSVN

SEQ ID NO: 872 - protein, 7 aa, Artificial Sequence
  chemically synthesized
KDTERPS

SEQ ID NO: 873 - protein, 7 aa, Artificial Sequence
  chemically synthesized
DVTNRPS

SEQ ID NO: 874 - protein, 7 aa, Artificial Sequence
  chemically synthesized
GNNQRPS

SEQ ID NO: 875 - protein, 7 aa, Artificial Sequence
  chemically synthesized
KASTLES

SEQ ID NO: 876 - protein, 11 aa, Artificial Sequence
  chemically synthesized
QSADNSITYRV

SEQ ID NO: 877 - protein, 12 aa, Artificial Sequence
  chemically synthesized
SSYTIVTNFEVL

SEQ ID NO: 878 - protein, 11 aa, Artificial Sequence
  chemically synthesized
AAWDDSLNGPV

SEQ ID NO: 879 - protein, 9 aa, Artificial Sequence
  chemically synthesized
QQSYSTPWT

SEQ ID NO: 880 - protein, 5 aa, Artificial Sequence
  chemically synthesized
SSWIH

SEQ ID NO: 881 - protein, 17 aa, Artificial Sequence
  chemically synthesized
YIYPSTGFTEYNQKFKD

SEQ ID NO: 882 - protein, 12 aa, Artificial Sequence
  chemically synthesized
WRDSSGYHAMDY

SEQ ID NO: 883 - protein, 15 aa, Artificial Sequence
  chemically synthesized
RASQSVSTSGYSYMH

SEQ ID NO: 884 - protein, 7 aa, Artificial Sequence
  chemically synthesized
FGSNLES

SEQ ID NO: 885 - protein, 9 aa, Artificial Sequence
  chemically synthesized
QHSWEIPYT

SEQ ID NO: 886 - protein, 12 aa, Artificial Sequence
  chemically synthesized
GFTFSSYDYYMH

SEQ ID NO: 887 - protein, 17 aa, Artificial Sequence
  chemically synthesized
VIWYSGSNTYYNDSLKS

SEQ ID NO: 888 - protein, 7 aa, Artificial Sequence
  chemically synthesized
AYFGVDV

SEQ ID NO: 889 - protein, 11 aa, Artificial Sequence
  chemically synthesized
RASQGIGNTLA

SEQ ID NO: 890 - protein, 17 aa, Artificial Sequence
  chemically synthesized
GINPSNGGTNYNEKFKN

SEQ ID NO: 891 - protein, 9 aa, Artificial Sequence
  chemically synthesized
QQYDHVPLT

SEQ ID NO: 892 - protein, 10 aa, Artificial Sequence
  chemically synthesized
GFSLTSYGVH

SEQ ID NO: 893 - protein, 16 aa, Artificial Sequence
  chemically synthesized
VIWAGGSTNYNPSLKS

SEQ ID NO: 894 - protein, 16 aa, Artificial Sequence
  chemically synthesized
VIYAGGSTNYNPSLKS

SEQ ID NO: 895 - protein, 9 aa, Artificial Sequence
  chemically synthesized
HQAYSSPYT

SEQ ID NO: 896 - protein, 10 aa, Artificial Sequence
  chemically synthesized
GFSLTSYGVH

SEQ ID NO: 897 - protein, 12 aa, Artificial Sequence
  chemically synthesized
ARAYGNYWYIDV

SEQ ID NO: 898 - protein, 11 aa, Artificial Sequence
  chemically synthesized
KASQSVSNDVA

SEQ ID NO: 899 - protein, 11 aa, Artificial Sequence
  chemically synthesized
KSSESVSNDVA

SEQ ID NO: 900 - protein, 7 aa, Artificial Sequence
  chemically synthesized
YAFHRFT

SEQ ID NO: 901 - protein, 5 aa, Artificial Sequence
  chemically synthesized
DYEMH

SEQ ID NO: 902 - protein, 17 aa, Artificial Sequence
  chemically synthesized
VIESETGGTAYNQKFKG

SEQ ID NO: 903 - protein, 16 aa, Artificial Sequence
  chemically synthesized
EGITTVATTYYWYFDV

SEQ ID NO: 904 - protein, 16 aa, Artificial Sequence
  chemically synthesized
RSSQSIVHSNGNTYLE

SEQ ID NO: 905 - protein, 7 aa, Artificial Sequence
  chemically synthesized
KVSNRFS

SEQ ID NO: 906 - protein, 9 aa, Artificial Sequence
  chemically synthesized
FQGSHVPLT

SEQ ID NO: 907 - protein, 10 aa, Artificial Sequence
  chemically synthesized
GYTFTTYPIE

SEQ ID NO: 908 - protein, 16 aa, Artificial Sequence
  chemically synthesized
NFHPYNDDTKYNEKFK

SEQ ID NO: 909 - protein, 12 aa, Artificial Sequence
  chemically synthesized
RASSSVISSYLH

SEQ ID NO: 910 - protein, 7 aa, Artificial Sequence
  chemically synthesized
STSNLAS

SEQ ID NO: 911 - protein, 9 aa, Artificial Sequence
  chemically synthesized
QQYNGYPLT

SEQ ID NO: 912 - protein, 9 aa, Artificial Sequence
  chemically synthesized
QQYNSYPLT

SEQ ID NO: 913 - protein, 6 aa, Artificial Sequence
  chemically synthesized
QGQSGQ

SEQ ID NO: 914 - protein, 5 aa, Artificial Sequence
  chemically synthesized
QGQSG

SEQ ID NO: 915 - protein, 4 aa, Artificial Sequence
  chemically synthesized
QGQS

SEQ ID NO: 916 - protein, 3 aa, Artificial Sequence
  chemically synthesized
QGQ

SEQ ID NO: 917 - protein, 2 aa, Artificial Sequence
  chemically synthesized
QG

SEQ ID NO: 918 - DNA, 21 bp, Artificial Sequence
  chemically synthesized
caaggccagtctggccaaggt

SEQ ID NO: 919 - protein, 151 aa, Artificial Sequence
  chemically synthesized
AMSGCSWSAFCPYLAGGGSSGGSISSGLLSGRSDNHGGGSDIQLTQSPSSLSASVGDRVTITCRASESVDSYGISFMNWFQQKPGKAPKLLIYAASNQGSGVPSRFSGSGSGTDFTLTISSMQPEDFATYYCQQSKDVPWTFGQGTKLEIK

SEQ ID NO: 920 - DNA, 453 bp, Artificial Sequence
  chemically synthesized
gcgatgagtgggtgctcgtggtctgctttttgcccgtatttggcgggaggtggctcgagcggcggctctatctcttccggactgctgtccggcagatccgacaatcacggcggaggatccgacatccagctgacccagagccctagcagcctgtctgccagcgtgggcgacagagtgaccatcacctgtagagccagcgagagcgtggacagttacggcatcagcttcatgaactggttccagcagaagcccggcaaggcccccaagctgctgatctacgccgccagcaatcagggcagcggcgtgccaagcagattttccggctctggcagcggcaccgacttcaccctgaccatcagcagcatgcagcccgaggacttcgccacctactactgccagcagagcaaggacgtgccctggacctttggccagggtaccaagctggaaatcaag

SEQ ID NO: 921 - protein, 151 aa, Artificial Sequence
  chemically synthesized
DVNCAIWYSVCTTVPGGGSSGGSISSGLLSGRSDNHGGGSDIQLTQSPSSLSASVGDRVTITCRASESVDSYGISFMNWFQQKPGKAPKLLIYAASNQGSGVPSRFSGSGSGTDFTLTISSMQPEDFATYYCQQSKDVPWTFGQGTKLEIK

SEQ ID NO: 922 - DNA, 453 bp, Artificial Sequence
  chemically synthesized
gatgttaattgcgctatttggtattcggtgtgcactactgttcctggaggtggctcgagcggcggctctatctcttccggactgctgtccggcagatccgacaatcacggcggaggatccgacatccagctgacccagagccctagcagcctgtctgccagcgtgggcgacagagtgaccatcacctgtagagccagcgagagcgtggacagttacggcatcagcttcatgaactggttccagcagaagcccggcaaggcccccaagctgctgatctacgccgccagcaatcagggcagcggcgtgccaagcagattttccggctctggcagcggcaccgacttcaccctgaccatcagcagcatgcagcccgaggacttcgccacctactactgccagcagagcaaggacgtgccctggacctttggccagggtaccaagctggaaatcaag

SEQ ID NO: 923 - protein, 151 aa, Artificial Sequence
  chemically synthesized
LVCPLYALSSGVCMGGGGSSGGSISSGLLSGRSDNHGGGSDIQLTQSPSSLSASVGDRVTITCRASESVDSYGISFMNWFQQKPGKAPKLLIYAASNQGSGVPSRFSGSGSGTDFTLTISSMQPEDFATYYCQQSKDVPWTFGQGTKLEIK

SEQ ID NO: 924 - DNA, 453 bp, Artificial Sequence
  chemically synthesized
ttggtttgccctttgtatgcattgagttctggggtgtgcatggggggaggtggctcgagcggcggctctatctcttccggactgctgtccggcagatccgacaatcacggcggaggatccgacatccagctgacccagagccctagcagcctgtctgccagcgtgggcgacagagtgaccatcacctgtagagccagcgagagcgtggacagttacggcatcagcttcatgaactggttccagcagaagcccggcaaggcccccaagctgctgatctacgccgccagcaatcagggcagcggcgtgccaagcagattttccggctctggcagcggcaccgacttcaccctgaccatcagcagcatgcagcccgaggacttcgccacctactactgccagcagagcaaggacgtgccctggacctttggccagggtaccaagctggaaatcaag

SEQ ID NO: 925 - protein, 151 aa, Artificial Sequence
  chemically synthesized
ETCNQYERSSGLCFAGGGSSGGSISSGLLSGRSDNHGGGSDIQLTQSPSSLSASVGDRVTITCRASESVDSYGISFMNWFQQKPGKAPKLLIYAASNQGSGVPSRFSGSGSGTDFTLTISSMQPEDFATYYCQQSKDVPWTFGQGTKLEIK

SEQ ID NO: 926 - DNA, 453 bp, Artificial Sequence
  chemically synthesized
gagacttgcaatcagtatgagaggtcgagtggtttgtgctttgcgggaggtggctcgagcggcggctctatctcttccggactgctgtccggcagatccgacaatcacggcggaggatccgacatccagctgacccagagccctagcagcctgtctgccagcgtgggcgacagagtgaccatcacctgtagagccagcgagagcgtggacagttacggcatcagcttcatgaactggttccagcagaagcccggcaaggcccccaagctgctgatctacgccgccagcaatcagggcagcggcgtgccaagcagattttccggctctggcagcggcaccgacttcaccctgaccatcagcagcatgcagcccgaggacttcgccacctactactgccagcagagcaaggacgtgccctggacctttggccagggtaccaagctggaaatcaag

SEQ ID NO: 927 - protein, 151 aa, Artificial Sequence
  chemically synthesized
APRTCYTYQCSSFYTGGGSSGGSISSGLLSGRSDNHGGGSDIQLTQSPSSLSASVGDRVTITCRASESVDSYGISFMNWFQQKPGKAPKLLIYAASNQGSGVPSRFSGSGSGTDFTLTISSMQPEDFATYYCQQSKDVPWTFGQGTKLEIK

SEQ ID NO: 928 - DNA, 453 bp, Artificial Sequence
  chemically synthesized
gcgccgcggacgtgctatacgtatcagtgctctagtttttatactggaggtggctcgagcggcggctctatctcttccggactgctgtccggcagatccgacaatcacggcggaggatccgacatccagctgacccagagccctagcagcctgtctgccagcgtgggcgacagagtgaccatcacctgtagagccagcgagagcgtggacagttacggcatcagcttcatgaactggttccagcagaagcccggcaaggcccccaagctgctgatctacgccgccagcaatcagggcagcggcgtgccaagcagattttccggctctggcagcggcaccgacttcaccctgaccatcagcagcatgcagcccgaggacttcgccacctactactgccagcagagcaaggacgtgccctggacctttggccagggtaccaagctggaaatcaag

SEQ ID NO: 929 - protein, 151 aa, Artificial Sequence
  chemically synthesized
GLCSWYLSSSGLCVDGGGSSGGSISSGLLSGRSDNHGGGSDIQLTQSPSSLSASVGDRVTITCRASESVDSYGISFMNWFQQKPGKAPKLLIYAASNQGSGVPSRFSGSGSGTDFTLTISSMQPEDFATYYCQQSKDVPWTFGQGTKLEIK

SEQ ID NO: 930 - DNA, 453 bp, Artificial Sequence
  chemically synthesized
ggtctttgcagttggtatcttagtagttcgggtttgtgcgtggatggaggtggctcgagcggcggctctatctcttccggactgctgtccggcagatccgacaatcacggcggaggatccgacatccagctgacccagagccctagcagcctgtctgccagcgtgggcgacagagtgaccatcacctgtagagccagcgagagcgtggacagttacggcatcagcttcatgaactggttccagcagaagcccggcaaggcccccaagctgctgatctacgccgccagcaatcagggcagcggcgtgccaagcagattttccggctctggcagcggcaccgacttcaccctgaccatcagcagcatgcagcccgaggacttcgccacctactactgccagcagagcaaggacgtgccctggacctttggccagggtaccaagctggaaatcaag

SEQ ID NO: 931 - protein, 151 aa, Artificial Sequence
  chemically synthesized
AMSGCSWSAFCPYLAGGGSSGGSISSGLLSGRSDNHGGGSDIQLTQSPSSLSASVGDRVTITCRASESVDAYGISFMNWFQQKPGKAPKLLIYAASNQGSGVPSRFSGSGSGTDFTLTISSMQPEDFATYYCQQSKDVPWTFGQGTKLEIK

SEQ ID NO: 932 - DNA, 453 bp, Artificial Sequence
  chemically synthesized
gcgatgagtgggtgctcgtggtctgctttttgcccgtatttggcgggaggtggctcgagcggcggctctatctcttccggactgctgtccggcagatccgacaatcacggcggaggatccgatatccagctgacccagagccctagcagcctgtctgccagcgtgggcgacagagtgaccatcacctgtagagccagcgagagcgtggacgcttacggcatcagcttcatgaactggttccagcagaagcccggcaaggcccccaagctgctgatctacgccgccagcaatcagggcagcggcgtgccaagcagattttccggctctggcagcggcaccgacttcaccctgaccatcagcagcatgcagcccgaggacttcgccacctactactgccagcagagcaaggacgtgccctggacctttggccagggtaccaagctggaaatcaag

SEQ ID NO: 933 - protein, 151 aa, Artificial Sequence
  chemically synthesized
DVNCAIWYSVCTTVPGGGSSGGSISSGLLSGRSDNHGGGSDIQLTQSPSSLSASVGDRVTITCRASESVDAYGISFMNWFQQKPGKAPKLLIYAASNQGSGVPSRFSGSGSGTDFTLTISSMQPEDFATYYCQQSKDVPWTFGQGTKLEIK

SEQ ID NO: 934 - DNA, 453 bp, Artificial Sequence
  chemically synthesized
gatgttaattgcgctatttggtattcggtgtgcactactgttcctggaggtggctcgagcggcggctctatctcttccggactgctgtccggcagatccgacaatcacggcggaggatccgatatccagctgacccagagccctagcagcctgtctgccagcgtgggcgacagagtgaccatcacctgtagagccagcgagagcgtggacgcttacggcatcagcttcatgaactggttccagcagaagcccggcaaggcccccaagctgctgatctacgccgccagcaatcagggcagcggcgtgccaagcagattttccggctctggcagcggcaccgacttcaccctgaccatcagcagcatgcagcccgaggacttcgccacctactactgccagcagagcaaggacgtgccctggacctttggccagggtaccaagctggaaatcaag

SEQ ID NO: 935 - protein, 151 aa, Artificial Sequence
  chemically synthesized
LVCPLYALSSGVCMGGGGSSGGSISSGLLSGRSDNHGGGSDIQLTQSPSSLSASVGDRVTITCRASESVDAYGISFMNWFQQKPGKAPKLLIYAASNQGSGVPSRFSGSGSGTDFTLTISSMQPEDFATYYCQQSKDVPWTFGQGTKLEIK

SEQ ID NO: 936 - DNA, 453 bp, Artificial Sequence
  chemically synthesized
ttggtttgccctttgtatgcattgagttctggggtgtgcatggggggaggtggctcgagcggcggctctatctcttccggactgctgtccggcagatccgacaatcacggcggaggatccgatatccagctgacccagagccctagcagcctgtctgccagcgtgggcgacagagtgaccatcacctgtagagccagcgagagcgtggacgcttacggcatcagcttcatgaactggttccagcagaagcccggcaaggcccccaagctgctgatctacgccgccagcaatcagggcagcggcgtgccaagcagattttccggctctggcagcggcaccgacttcaccctgaccatcagcagcatgcagcccgaggacttcgccacctactactgccagcagagcaaggacgtgccctggacctttggccagggtaccaagctggaaatcaag

SEQ ID NO: 937 - protein, 151 aa, Artificial Sequence
  chemically synthesized
SVNCRIWSAVCAGYEGGGSSGGSISSGLLSGRSDNHGGGSDIQLTQSPSSLSASVGDRVTITCRASESVDAYGISFMNWFQQKPGKAPKLLIYAASNQGSGVPSRFSGSGSGTDFTLTISSMQPEDFATYYCQQSKDVPWTFGQGTKLEIK

SEQ ID NO: 938 - DNA, 453 bp, Artificial Sequence
  chemically synthesized
tctgtgaattgccggatttggtcggctgtttgcgcggggtatgagggaggtggctcgagcggcggctctatctcttccggactgctgtccggcagatccgacaatcacggcggaggatccgatatccagctgacccagagccctagcagcctgtctgccagcgtgggcgacagagtgaccatcacctgtagagccagcgagagcgtggacgcttacggcatcagcttcatgaactggttccagcagaagcccggcaaggcccccaagctgctgatctacgccgccagcaatcagggcagcggcgtgccaagcagattttccggctctggcagcggcaccgacttcaccctgaccatcagcagcatgcagcccgaggacttcgccacctactactgccagcagagcaaggacgtgccctggacctttggccagggtaccaagctggaaatcaag

SEQ ID NO: 939 - protein, 151 aa, Artificial Sequence
  chemically synthesized
MLVCSLQPTAMCERVGGGSSGGSISSGLLSGRSDNHGGGSDIQLTQSPSSLSASVGDRVTITCRASESVDAYGISFMNWFQQKPGKAPKLLIYAASNQGSGVPSRFSGSGSGTDFTLTISSMQPEDFATYYCQQSKDVPWTFGQGTKLEIK

SEQ ID NO: 940 - DNA, 453 bp, Artificial Sequence
  chemically synthesized
atgcttgtgtgctcgttgcagcctactgcgatgtgcgagcgggtgggaggtggctcgagcggcggctctatctcttccggactgctgtccggcagatccgacaatcacggcggaggatccgatatccagctgacccagagccctagcagcctgtctgccagcgtgggcgacagagtgaccatcacctgtagagccagcgagagcgtggacgcttacggcatcagcttcatgaactggttccagcagaagcccggcaaggcccccaagctgctgatctacgccgccagcaatcagggcagcggcgtgccaagcagattttccggctctggcagcggcaccgacttcaccctgaccatcagcagcatgcagcccgaggacttcgccacctactactgccagcagagcaaggacgtgccctggacctttggccagggtaccaagctggaaatcaag

SEQ ID NO: 941 - protein, 151 aa, Artificial Sequence
  chemically synthesized
APRCYMFASYCKSQYGGGSSGGSISSGLLSGRSDNHGGGSDIQLTQSPSSLSASVGDRVTITCRASESVDAYGISFMNWFQQKPGKAPKLLIYAASNQGSGVPSRFSGSGSGTDFTLTISSMQPEDFATYYCQQSKDVPWTFGQGTKLEIK

SEQ ID NO: 942 - DNA, 453 bp, Artificial Sequence
  chemically synthesized
gcgcctaggtgctatatgtttgcgtcgtattgcaagagtcagtatggaggtggctcgagcggcggctctatctcttccggactgctgtccggcagatccgacaatcacggcggaggatccgatatccagctgacccagagccctagcagcctgtctgccagcgtgggcgacagagtgaccatcacctgtagagccagcgagagcgtggacgcttacggcatcagcttcatgaactggttccagcagaagcccggcaaggcccccaagctgctgatctacgccgccagcaatcagggcagcggcgtgccaagcagattttccggctctggcagcggcaccgacttcaccctgaccatcagcagcatgcagcccgaggacttcgccacctactactgccagcagagcaaggacgtgccctggacctttggccagggtaccaagctggaaatcaag

SEQ ID NO: 943 - protein, 151 aa, Artificial Sequence
  chemically synthesized
VGPCELTPKPVCNTYGGGSSGGSISSGLLSGRSDNHGGGSDIQLTQSPSSLSASVGDRVTITCRASESVDAYGISFMNWFQQKPGKAPKLLIYAASNQGSGVPSRFSGSGSGTDFTLTISSMQPEDFATYYCQQSKDVPWTFGQGTKLEIK

SEQ ID NO: 944 - DNA, 453 bp, Artificial Sequence
  chemically synthesized
gtggggccttgcgagttgacgccgaagcctgtttgcaatacgtatggaggtggctcgagcggcggctctatctcttccggactgctgtccggcagatccgacaatcacggcggaggatccgatatccagctgacccagagccctagcagcctgtctgccagcgtgggcgacagagtgaccatcacctgtagagccagcgagagcgtggacgcttacggcatcagcttcatgaactggttccagcagaagcccggcaaggcccccaagctgctgatctacgccgccagcaatcagggcagcggcgtgccaagcagattttccggctctggcagcggcaccgacttcaccctgaccatcagcagcatgcagcccgaggacttcgccacctactactgccagcagagcaaggacgtgccctggacctttggccagggtaccaagctggaaatcaag

SEQ ID NO: 945 - protein, 151 aa, Artificial Sequence
  chemically synthesized
ETCNQYERSSGLCFAGGGSSGGSISSGLLSGRSDNHGGGSDIQLTQSPSSLSASVGDRVTITCRASESVDAYGISFMNWFQQKPGKAPKLLIYAASNQGSGVPSRFSGSGSGTDFTLTISSMQPEDFATYYCQQSKDVPWTFGQGTKLEIK

SEQ ID NO: 946 - DNA, 453 bp, Artificial Sequence
  chemically synthesized
gagacttgcaatcagtatgagaggtcgagtggtttgtgctttgcgggaggtggctcgagcggcggctctatctcttccggactgctgtccggcagatccgacaatcacggcggaggatccgatatccagctgacccagagccctagcagcctgtctgccagcgtgggcgacagagtgaccatcacctgtagagccagcgagagcgtggacgcttacggcatcagcttcatgaactggttccagcagaagcccggcaaggcccccaagctgctgatctacgccgccagcaatcagggcagcggcgtgccaagcagattttccggctctggcagcggcaccgacttcaccctgaccatcagcagcatgcagcccgaggacttcgccacctactactgccagcagagcaaggacgtgccctggacctttggccagggtaccaagctggaaatcaag

SEQ ID NO: 947 - protein, 151 aa, Artificial Sequence
  chemically synthesized
APRTCYTYQCSSFYTGGGSSGGSISSGLLSGRSDNHGGGSDIQLTQSPSSLSASVGDRVTITCRASESVDAYGISFMNWFQQKPGKAPKLLIYAASNQGSGVPSRFSGSGSGTDFTLTISSMQPEDFATYYCQQSKDVPWTFGQGTKLEIK

SEQ ID NO: 948 - DNA, 453 bp, Artificial Sequence
  chemically synthesized
gcgccgcggacgtgctatacgtatcagtgctctagtttttatactggaggtggctcgagcggcggctctatctcttccggactgctgtccggcagatccgacaatcacggcggaggatccgatatccagctgacccagagccctagcagcctgtctgccagcgtgggcgacagagtgaccatcacctgtagagccagcgagagcgtggacgcttacggcatcagcttcatgaactggttccagcagaagcccggcaaggcccccaagctgctgatctacgccgccagcaatcagggcagcggcgtgccaagcagattttccggctctggcagcggcaccgacttcaccctgaccatcagcagcatgcagcccgaggacttcgccacctactactgccagcagagcaaggacgtgccctggacctttggccagggtaccaagctggaaatcaag

SEQ ID NO: 949 - protein, 151 aa, Artificial Sequence
  chemically synthesized
GLCSWYLSSSGLCVDGGGSSGGSISSGLLSGRSDNHGGGSDIQLTQSPSSLSASVGDRVTITCRASESVDAYGISFMNWFQQKPGKAPKLLIYAASNQGSGVPSRFSGSGSGTDFTLTISSMQPEDFATYYCQQSKDVPWTFGQGTKLEIK

SEQ ID NO: 950 - DNA, 453 bp, Artificial Sequence
  chemically synthesized
ggtctttgcagttggtatcttagtagttcgggtttgtgcgtggatggaggtggctcgagcggcggctctatctcttccggactgctgtccggcagatccgacaatcacggcggaggatccgatatccagctgacccagagccctagcagcctgtctgccagcgtgggcgacagagtgaccatcacctgtagagccagcgagagcgtggacgcttacggcatcagcttcatgaactggttccagcagaagcccggcaaggcccccaagctgctgatctacgccgccagcaatcagggcagcggcgtgccaagcagattttccggctctggcagcggcaccgacttcaccctgaccatcagcagcatgcagcccgaggacttcgccacctactactgccagcagagcaaggacgtgccctggacctttggccagggtaccaagctggaaatcaag

SEQ ID NO: 951 - protein, 151 aa, Artificial Sequence
  chemically synthesized
VPWCQLTPRVMCMWAGGGSSGGSISSGLLSGRSDNHGGGSDIQLTQSPSSLSASVGDRVTITCRASESVDAYGISFMNWFQQKPGKAPKLLIYAASNQGSGVPSRFSGSGSGTDFTLTISSMQPEDFATYYCQQSKDVPWTFGQGTKLEIK

SEQ ID NO: 952 - DNA, 453 bp, Artificial Sequence
  chemically synthesized
gtgccttggtgccagttgacgccgcgggttatgtgcatgtgggcgggaggtggctcgagcggcggctctatctcttccggactgctgtccggcagatccgacaatcacggcggaggatccgatatccagctgacccagagccctagcagcctgtctgccagcgtgggcgacagagtgaccatcacctgtagagccagcgagagcgtggacgcttacggcatcagcttcatgaactggttccagcagaagcccggcaaggcccccaagctgctgatctacgccgccagcaatcagggcagcggcgtgccaagcagattttccggctctggcagcggcaccgacttcaccctgaccatcagcagcatgcagcccgaggacttcgccacctactactgccagcagagcaaggacgtgccctggacctttggccagggtaccaagctggaaatcaag

SEQ ID NO: 953 - protein, 151 aa, Artificial Sequence
  chemically synthesized
NWLDCQFYSECSVYGGGGSSGGSISSGLLSGRSDNHGGGSDIQLTQSPSSLSASVGDRVTITCRASESVDAYGISFMNWFQQKPGKAPKLLIYAASNQGSGVPSRFSGSGSGTDFTLTISSMQPEDFATYYCQQSKDVPWTFGQGTKLEIK

SEQ ID NO: 954 - DNA, 453 bp, Artificial Sequence
  chemically synthesized
aattggttggattgccagttttattctgagtgctctgtttatggtggaggtggctcgagcggcggctctatctcttccggactgctgtccggcagatccgacaatcacggcggaggatccgatatccagctgacccagagccctagcagcctgtctgccagcgtgggcgacagagtgaccatcacctgtagagccagcgagagcgtggacgcttacggcatcagcttcatgaactggttccagcagaagcccggcaaggcccccaagctgctgatctacgccgccagcaatcagggcagcggcgtgccaagcagattttccggctctggcagcggcaccgacttcaccctgaccatcagcagcatgcagcccgaggacttcgccacctactactgccagcagagcaaggacgtgccctggacctttggccagggtaccaagctggaaatcaag

SEQ ID NO: 955 - protein, 151 aa, Artificial Sequence
  chemically synthesized
SCPLYVMSSFGGCWDGGGSSGGSISSGLLSGRSDNHGGGSDIQLTQSPSSLSASVGDRVTITCRASESVDAYGISFMNWFQQKPGKAPKLLIYAASNQGSGVPSRFSGSGSGTDFTLTISSMQPEDFATYYCQQSKDVPWTFGQGTKLEIK

SEQ ID NO: 956 - DNA, 453 bp, Artificial Sequence
  chemically synthesized
tcgtgccctttgtatgtgatgtctagttttggtgggtgctgggatggaggtggctcgagcggcggctctatctcttccggactgctgtccggcagatccgacaatcacggcggaggatccgatatccagctgacccagagccctagcagcctgtctgccagcgtgggcgacagagtgaccatcacctgtagagccagcgagagcgtggacgcttacggcatcagcttcatgaactggttccagcagaagcccggcaaggcccccaagctgctgatctacgccgccagcaatcagggcagcggcgtgccaagcagattttccggctctggcagcggcaccgacttcaccctgaccatcagcagcatgcagcccgaggacttcgccacctactactgccagcagagcaaggacgtgccctggacctttggccagggtaccaagctggaaatcaag

SEQ ID NO: 957 - protein, 151 aa, Artificial Sequence
  chemically synthesized
MSHCWMFSSSCDGVKGGGSSGGSISSGLLSGRSDNHGGGSDIQLTQSPSSLSASVGDRVTITCRASESVDAYGISFMNWFQQKPGKAPKLLIYAASNQGSGVPSRFSGSGSGTDFTLTISSMQPEDFATYYCQQSKDVPWTFGQGTKLEIK

SEQ ID NO: 958 - DNA, 453 bp, Artificial Sequence
  chemically synthesized
atgagtcattgctggatgttttcgagttcttgcgatggggtgaagggaggtggctcgagcggcggctctatctcttccggactgctgtccggcagatccgacaatcacggcggaggatccgatatccagctgacccagagccctagcagcctgtctgccagcgtgggcgacagagtgaccatcacctgtagagccagcgagagcgtggacgcttacggcatcagcttcatgaactggttccagcagaagcccggcaaggcccccaagctgctgatctacgccgccagcaatcagggcagcggcgtgccaagcagattttccggctctggcagcggcaccgacttcaccctgaccatcagcagcatgcagcccgaggacttcgccacctactactgccagcagagcaaggacgtgccctggacctttggccagggtaccaagctggaaatcaag

SEQ ID NO: 959 - protein, 151 aa, Artificial Sequence
  chemically synthesized
VSYCTWLIEVTCLRGGGGSSGGSISSGLLSGRSDNHGGGSDIQLTQSPSSLSASVGDRVTITCRASESVDAYGISFMNWFQQKPGKAPKLLIYAASNQGSGVPSRFSGSGSGTDFTLTISSMQPEDFATYYCQQSKDVPWTFGQGTKLEIK

SEQ ID NO: 960 - DNA, 453 bp, Artificial Sequence
  chemically synthesized
gtttcgtattgcacgtggttgattgaggtgacttgcctgaggggtggaggtggctcgagcggcggctctatctcttccggactgctgtccggcagatccgacaatcacggcggaggatccgatatccagctgacccagagccctagcagcctgtctgccagcgtgggcgacagagtgaccatcacctgtagagccagcgagagcgtggacgcttacggcatcagcttcatgaactggttccagcagaagcccggcaaggcccccaagctgctgatctacgccgccagcaatcagggcagcggcgtgccaagcagattttccggctctggcagcggcaccgacttcaccctgaccatcagcagcatgcagcccgaggacttcgccacctactactgccagcagagcaaggacgtgccctggacctttggccagggtaccaagctggaaatcaag

SEQ ID NO: 961 - protein, 151 aa, Artificial Sequence
  chemically synthesized
VLCAAYALSSGICGGGGGSSGGSISSGLLSGRSDNHGGGSDIQLTQSPSSLSASVGDRVTITCRASESVDAYGISFMNWFQQKPGKAPKLLIYAASNQGSGVPSRFSGSGSGTDFTLTISSMQPEDFATYYCQQSKDVPWTFGQGTKLEIK

SEQ ID NO: 962 - DNA, 453 bp, Artificial Sequence
  chemically synthesized
gttttgtgcgctgcttatgctttgagttcgggtatttgcggtgggggaggtggctcgagcggcggctctatctcttccggactgctgtccggcagatccgacaatcacggcggaggatccgatatccagctgacccagagccctagcagcctgtctgccagcgtgggcgacagagtgaccatcacctgtagagccagcgagagcgtggacgcttacggcatcagcttcatgaactggttccagcagaagcccggcaaggcccccaagctgctgatctacgccgccagcaatcagggcagcggcgtgccaagcagattttccggctctggcagcggcaccgacttcaccctgaccatcagcagcatgcagcccgaggacttcgccacctactactgccagcagagcaaggacgtgccctggacctttggccagggtaccaagctggaaatcaag

SEQ ID NO: 963 - protein, 151 aa, Artificial Sequence
  chemically synthesized
TTCNLYQQSSMFCNAGGGSSGGSISSGLLSGRSDNHGGGSDIQLTQSPSSLSASVGDRVTITCRASESVDAYGISFMNWFQQKPGKAPKLLIYAASNQGSGVPSRFSGSGSGTDFTLTISSMQPEDFATYYCQQSKDVPWTFGQGTKLEIK

SEQ ID NO: 964 - DNA, 453 bp, Artificial Sequence
  chemically synthesized
acgacttgcaatctgtatcagcagtcttctatgttttgcaatgctggaggtggctcgagcggcggctctatctcttccggactgctgtccggcagatccgacaatcacggcggaggatccgatatccagctgacccagagccctagcagcctgtctgccagcgtgggcgacagagtgaccatcacctgtagagccagcgagagcgtggacgcttacggcatcagcttcatgaactggttccagcagaagcccggcaaggcccccaagctgctgatctacgccgccagcaatcagggcagcggcgtgccaagcagattttccggctctggcagcggcaccgacttcaccctgaccatcagcagcatgcagcccgaggacttcgccacctactactgccagcagagcaaggacgtgccctggacctttggccagggtaccaagctggaaatcaag

SEQ ID NO: 965 - protein, 151 aa, Artificial Sequence; identical to SEQ ID NO: 941
  chemically synthesized

SEQ ID NO: 966 - DNA, 453 bp, Artificial Sequence; identical to SEQ ID NO: 942
  chemically synthesized

SEQ ID NO: 967 - protein, 151 aa, Artificial Sequence
  chemically synthesized
PCDQNPYFYPYVCHAGGGSSGGSISSGLLSGRSDNHGGGSDIQLTQSPSSLSASVGDRVTITCRASESVDAYGISFMNWFQQKPGKAPKLLIYAASNQGSGVPSRFSGSGSGTDFTLTISSMQPEDFATYYCQQSKDVPWTFGQGTKLEIK

SEQ ID NO: 968 - DNA, 453 bp, Artificial Sequence
  chemically synthesized
ccttgcgatcagaatccgtatttttatccgtatgtgtgccatgcgggaggtggctcgagcggcggctctatctcttccggactgctgtccggcagatccgacaatcacggcggaggatccgatatccagctgacccagagccctagcagcctgtctgccagcgtgggcgacagagtgaccatcacctgtagagccagcgagagcgtggacgcttacggcatcagcttcatgaactggttccagcagaagcccggcaaggcccccaagctgctgatctacgccgccagcaatcagggcagcggcgtgccaagcagattttccggctctggcagcggcaccgacttcaccctgaccatcagcagcatgcagcccgaggacttcgccacctactactgccagcagagcaaggacgtgccctggacctttggccagggtaccaagctggaaatcaag

SEQ ID NO: 969 - protein, 151 aa, Artificial Sequence
  chemically synthesized
SVCPMYALSSMLCGAGGGSSGGSISSGLLSGRSDNHGGGSDIQLTQSPSSLSASVGDRVTITCRASESVDAYGISFMNWFQQKPGKAPKLLIYAASNQGSGVPSRFSGSGSGTDFTLTISSMQPEDFATYYCQQSKDVPWTFGQGTKLEIK

SEQ ID NO: 970 - DNA, 453 bp, Artificial Sequence
  chemically synthesized
tctgtgtgccctatgtatgcgttgagttctatgttgtgcggtgcgggaggtggctcgagcggcggctctatctcttccggactgctgtccggcagatccgacaatcacggcggaggatccgatatccagctgacccagagccctagcagcctgtctgccagcgtgggcgacagagtgaccatcacctgtagagccagcgagagcgtggacgcttacggcatcagcttcatgaactggttccagcagaagcccggcaaggcccccaagctgctgatctacgccgccagcaatcagggcagcggcgtgccaagcagattttccggctctggcagcggcaccgacttcaccctgaccatcagcagcatgcagcccgaggacttcgccacctactactgccagcagagcaaggacgtgccctggacctttggccagggtaccaagctggaaatcaag

SEQ ID NO: 971 - protein, 151 aa, Artificial Sequence
  chemically synthesized
LSVECYVFSRCSSLPGGGSSGGSISSGLLSGRSDNHGGGSDIQLTQSPSSLSASVGDRVTITCRASESVDAYGISFMNWFQQKPGKAPKLLIYAASNQGSGVPSRFSGSGSGTDFTLTISSMQPEDFATYYCQQSKDVPWTFGQGTKLEIK

SEQ ID NO: 972 - DNA, 453 bp, Artificial Sequence
  chemically synthesized
ttgtctgtggagtgctatgtgttttcgcggtgcagtagtctgccgggaggtggctcgagcggcggctctatctcttccggactgctgtccggcagatccgacaatcacggcggaggatccgatatccagctgacccagagccctagcagcctgtctgccagcgtgggcgacagagtgaccatcacctgtagagccagcgagagcgtggacgcttacggcatcagcttcatgaactggttccagcagaagcccggcaaggcccccaagctgctgatctacgccgccagcaatcagggcagcggcgtgccaagcagattttccggctctggcagcggcaccgacttcaccctgaccatcagcagcatgcagcccgaggacttcgccacctactactgccagcagagcaaggacgtgccctggacctttggccagggtaccaagctggaaatcaag

SEQ ID NO: 973 - protein, 150 aa, Artificial Sequence
  chemically synthesized
FYCTYLVSLTCHPQGGGSSGGSISSGLLSGRSDNHGGGSDIQLTQSPSSLSASVGDRVTITCRASESVDAYGISFMNWFQQKPGKAPKLLIYAASNQGSGVPSRFSGSGSGTDFTLTISSMQPEDFATYYCQQSKDVPWTFGQGTKLEIK

SEQ ID NO: 974 - DNA, 450 bp, Artificial Sequence
  chemically synthesized
ttttattgcacttatttggtgtctttgacttgccatccgcagggaggtggctcgagcggcggctctatctcttccggactgctgtccggcagatccgacaatcacggcggaggatccgatatccagctgacccagagccctagcagcctgtctgccagcgtgggcgacagagtgaccatcacctgtagagccagcgagagcgtggacgcttacggcatcagcttcatgaactggttccagcagaagcccggcaaggcccccaagctgctgatctacgccgccagcaatcagggcagcggcgtgccaagcagattttccggctctggcagcggcaccgacttcaccctgaccatcagcagcatgcagcccgaggacttcgccacctactactgccagcagagcaaggacgtgccctggacctttggccagggtaccaagctggaaatcaag

SEQ ID NO: 975 - protein, 151 aa, Artificial Sequence
  chemically synthesized
SMAGCQWSSFCVQRDGGGSSGGSISSGLLSGRSDNHGGGSDIQLTQSPSSLSASVGDRVTITCRASESVDAYGISFMNWFQQKPGKAPKLLIYAASNQGSGVPSRFSGSGSGTDFTLTISSMQPEDFATYYCQQSKDVPWTFGQGTKLEIK

SEQ ID NO: 976 - DNA, 453 bp, Artificial Sequence
  chemically synthesized
tctatggcgggttgccagtggagttcgttttgcgtgcagcgggatggaggtggctcgagcggcggctctatctcttccggactgctgtccggcagatccgacaatcacggcggaggatccgatatccagctgacccagagccctagcagcctgtctgccagcgtgggcgacagagtgaccatcacctgtagagccagcgagagcgtggacgcttacggcatcagcttcatgaactggttccagcagaagcccggcaaggcccccaagctgctgatctacgccgccagcaatcagggcagcggcgtgccaagcagattttccggctctggcagcggcaccgacttcaccctgaccatcagcagcatgcagcccgaggacttcgccacctactactgccagcagagcaaggacgtgccctggacctttggccagggtaccaagctggaaatcaag

SEQ ID NO: 977 - protein, 151 aa, Artificial Sequence
  chemically synthesized
IYSCYMFASRCTSDKGGGSSGGSISSGLLSGRSDNHGGGSDIQLTQSPSSLSASVGDRVTITCRASESVDAYGISFMNWFQQKPGKAPKLLIYAASNQGSGVPSRFSGSGSGTDFTLTISSMQPEDFATYYCQQSKDVPWTFGQGTKLEIK

SEQ ID NO: 978 - DNA, 453 bp, Artificial Sequence
  chemically synthesized
atttattcgtgctatatgtttgcttcgcggtgcacgtctgataagggaggtggctcgagcggcggctctatctcttccggactgctgtccggcagatccgacaatcacggcggaggatccgatatccagctgacccagagccctagcagcctgtctgccagcgtgggcgacagagtgaccatcacctgtagagccagcgagagcgtggacgcttacggcatcagcttcatgaactggttccagcagaagcccggcaaggcccccaagctgctgatctacgccgccagcaatcagggcagcggcgtgccaagcagattttccggctctggcagcggcaccgacttcaccctgaccatcagcagcatgcagcccgaggacttcgccacctactactgccagcagagcaaggacgtgccctggacctttggccagggtaccaagctggaaatcaag

SEQ ID NO: 979 - protein, 154 aa, Artificial Sequence
  chemically synthesized
DVNCAIWYSVCTTVPGGGSSGGAVGLLAPPGGLSGRSDNHGGSDIQLTQSPSSLSASVGDRVTITCRASESVDAYGISFMNWFQQKPGKAPKLLIYAASNQGSGVPSRFSGSGSGTDFTLTISSMQPEDFATYYCQQSKDVPWTFGQGTKLEIK

SEQ ID NO: 980 - DNA, 558 bp, Artificial Sequence
  chemically synthesized
caaggccagtctggccaaggtgatgttaattgcgctatttggtattcggtgtgcactactgttcctggaggtggctcgagcggcggctctatctcttccggactgctgtccggcagatccgacaatcacggcggaggatccggaggtggctcgagcggcggcgctgtgggactgctggctcctcctggtggcctgtctggcagatctgataaccacggaggatccgatatccagctgacccagagccctagcagcctgtctgccagcgtgggcgacagagtgaccatcacctgtagagccagcgagagcgtggacgcttacggcatcagcttcatgaactggttccagcagaagcccggcaaggcccccaagctgctgatctacgccgccagcaatcagggcagcggcgtgccaagcagattttccggctctggcagcggcaccgacttcaccctgaccatcagcagcatgcagcccgaggacttcgccacctactactgccagcagagcaaggacgtgccctggacctttggccagggtaccaagctggaaatcaag

SEQ ID NO: 981 - protein, 154 aa, Artificial Sequence
  chemically synthesized
NWLDCQFYSECSVYGGGGSSGGAVGLLAPPGGLSGRSDNHGGSDIQLTQSPSSLSASVGDRVTITCRASESVDAYGISFMNWFQQKPGKAPKLLIYAASNQGSGVPSRFSGSGSGTDFTLTISSMQPEDFATYYCQQSKDVPWTFGQGTKLEIK

SEQ ID NO: 982 - DNA, 537 bp, Artificial Sequence
  chemically synthesized
aattggttggattgccagttttattctgagtgctctgtttatggtggaggtggctcgagcggcggctctatctcttccggactgctgtccggcagatccgacaatcacggcggaggatccggaggtggctcgagcggcggcgctgtgggactgctggctcctcctggtggcctgtctggcagatctgataaccacggaggatccgatatccagctgacccagagccctagcagcctgtctgccagcgtgggcgacagagtgaccatcacctgtagagccagcgagagcgtggacgcttacggcatcagcttcatgaactggttccagcagaagcccggcaaggcccccaagctgctgatctacgccgccagcaatcagggcagcggcgtgccaagcagattttccggctctggcagcggcaccgacttcaccctgaccatcagcagcatgcagcccgaggacttcgccacctactactgccagcagagcaaggacgtgccctggacctttggccagggtaccaagctggaaatcaag

SEQ ID NO: 983 - protein, 154 aa, Artificial Sequence
  chemically synthesized
VLCAAYALSSGICGGGGGSSGGAVGLLAPPGGLSGRSDNHGGSDIQLTQSPSSLSASVGDRVTITCRASESVDAYGISFMNWFQQKPGKAPKLLIYAASNQGSGVPSRFSGSGSGTDFTLTISSMQPEDFATYYCQQSKDVPWTFGQGTKLEIK

SEQ ID NO: 984 - DNA, 537 bp, Artificial Sequence
  chemically synthesized
gttttgtgcgctgcttatgctttgagttcgggtatttgcggtgggggaggtggctcgagcggcggctctatctcttccggactgctgtccggcagatccgacaatcacggcggaggatccggaggtggctcgagcggcggcgctgtgggactgctggctcctcctggtggcctgtctggcagatctgataaccacggaggatccgatatccagctgacccagagccctagcagcctgtctgccagcgtgggcgacagagtgaccatcacctgtagagccagcgagagcgtggacgcttacggcatcagcttcatgaactggttccagcagaagcccggcaaggcccccaagctgctgatctacgccgccagcaatcagggcagcggcgtgccaagcagattttccggctctggcagcggcaccgacttcaccctgaccatcagcagcatgcagcccgaggacttcgccacctactactgccagcagagcaaggacgtgccctggacctttggccagggtaccaagctggaaatcaag

SEQ ID NO: 985 - protein, 151 aa, Artificial Sequence
  chemically synthesized
SRCSVYEVSSGLCDWGGGSSGGSISSGLLSGRSDNHGGGSDIQLTQSPSSLSASVGDRVTITCRASESVDAYGISFMNWFQQKPGKAPKLLIYAASNQGSGVPSRFSGSGSGTDFTLTISSMQPEDFATYYCQQSKDVPWTFGQGTKLEIK

SEQ ID NO: 986 - DNA, 453 bp, Artificial Sequence
  chemically synthesized
tctcgttgctctgtgtatgaggtttcgtcggggctgtgcgattggggaggtggctcgagcggcggctctatctcttccggactgctgtccggcagatccgacaatcacggcggaggatccgatatccagctgacccagagccctagcagcctgtctgccagcgtgggcgacagagtgaccatcacctgtagagccagcgagagcgtggacgcttacggcatcagcttcatgaactggttccagcagaagcccggcaaggcccccaagctgctgatctacgccgccagcaatcagggcagcggcgtgccaagcagattttccggctctggcagcggcaccgacttcaccctgaccatcagcagcatgcagcccgaggacttcgccacctactactgccagcagagcaaggacgtgccctggacctttggccagggtaccaagctggaaatcaag

SEQ ID NO: 987 - protein, 151 aa, Artificial Sequence
  chemically synthesized
GMCSAYAYSSKLCTIGGGSSGGSISSGLLSGRSDNHGGGSDIQLTQSPSSLSASVGDRVTITCRASESVDAYGISFMNWFQQKPGKAPKLLIYAASNQGSGVPSRFSGSGSGTDFTLTISSMQPEDFATYYCQQSKDVPWTFGQGTKLEIK

SEQ ID NO: 988 - DNA, 453 bp, Artificial Sequence
  chemically synthesized
gggatgtgctcggcgtatgcttattcgagtaagttgtgcactattggaggtggctcgagcggcggctctatctcttccggactgctgtccggcagatccgacaatcacggcggaggatccgatatccagctgacccagagccctagcagcctgtctgccagcgtgggcgacagagtgaccatcacctgtagagccagcgagagcgtggacgcttacggcatcagcttcatgaactggttccagcagaagcccggcaaggcccccaagctgctgatctacgccgccagcaatcagggcagcggcgtgccaagcagattttccggctctggcagcggcaccgacttcaccctgaccatcagcagcatgcagcccgaggacttcgccacctactactgccagcagagcaaggacgtgccctggacctttggccagggtaccaagctggaaatcaag

SEQ ID NO: 989 - protein, 151 aa, Artificial Sequence
  chemically synthesized
MTTNTCNLLCQQFLTGGGSSGGSISSGLLSGRSDNHGGGSDIQLTQSPSSLSASVGDRVTITCRASESVDAYGISFMNWFQQKPGKAPKLLIYAASNQGSGVPSRFSGSGSGTDFTLTISSMQPEDFATYYCQQSKDVPWTFGQGTKLEIK

SEQ ID NO: 990 - DNA, 453 bp, Artificial Sequence
  chemically synthesized
atgactacgaatacttgcaatctgttgtgccagcagtttttgacgggaggtggctcgagcggcggctctatctcttccggactgctgtccggcagatccgacaatcacggcggaggatccgatatccagctgacccagagccctagcagcctgtctgccagcgtgggcgacagagtgaccatcacctgtagagccagcgagagcgtggacgcttacggcatcagcttcatgaactggttccagcagaagcccggcaaggcccccaagctgctgatctacgccgccagcaatcagggcagcggcgtgccaagcagattttccggctctggcagcggcaccgacttcaccctgaccatcagcagcatgcagcccgaggacttcgccacctactactgccagcagagcaaggacgtgccctggacctttggccagggtaccaagctggaaatcaag

SEQ ID NO: 991 - protein, 151 aa, Artificial Sequence
  chemically synthesized
FQPCLMFASSCFTSKGGGSSGGSISSGLLSGRSDNHGGGSDIQLTQSPSSLSASVGDRVTITCRASESVDAYGISFMNWFQQKPGKAPKLLIYAASNQGSGVPSRFSGSGSGTDFTLTISSMQPEDFATYYCQQSKDVPWTFGQGTKLEIK

SEQ ID NO: 992 - DNA, 453 bp, Artificial Sequence
  chemically synthesized
tttcagccgtgcctgatgtttgcgagtagttgctttactagtaagggaggtggctcgagcggcggctctatctcttccggactgctgtccggcagatccgacaatcacggcggaggatccgatatccagctgacccagagccctagcagcctgtctgccagcgtgggcgacagagtgaccatcacctgtagagccagcgagagcgtggacgcttacggcatcagcttcatgaactggttccagcagaagcccggcaaggcccccaagctgctgatctacgccgccagcaatcagggcagcggcgtgccaagcagattttccggctctggcagcggcaccgacttcaccctgaccatcagcagcatgcagcccgaggacttcgccacctactactgccagcagagcaaggacgtgccctggacctttggccagggtaccaagctggaaatcaag

SEQ ID NO: 993 - protein, 151 aa, Artificial Sequence
  chemically synthesized
ALCSMYLASSGLCNKGGGSSGGSISSGLLSGRSDNHGGGSDIQLTQSPSSLSASVGDRVTITCRASESVDAYGISFMNWFQQKPGKAPKLLIYAASNQGSGVPSRFSGSGSGTDFTLTISSMQPEDFATYYCQQSKDVPWTFGQGTKLEIK

SEQ ID NO: 994 - DNA, 453 bp, Artificial Sequence
  chemically synthesized
gcgctttgcagtatgtatcttgctagttctgggctgtgcaataagggaggtggctcgagcggcggctctatctcttccggactgctgtccggcagatccgacaatcacggcggaggatccgatatccagctgacccagagccctagcagcctgtctgccagcgtgggcgacagagtgaccatcacctgtagagccagcgagagcgtggacgcttacggcatcagcttcatgaactggttccagcagaagcccggcaaggcccccaagctgctgatctacgccgccagcaatcagggcagcggcgtgccaagcagattttccggctctggcagcggcaccgacttcaccctgaccatcagcagcatgcagcccgaggacttcgccacctactactgccagcagagcaaggacgtgccctggacctttggccagggtaccaagctggaaatcaag

SEQ ID NO: 995 - protein, 151 aa, Artificial Sequence
  chemically synthesized
EFCARDWLPYQCSSFGGGSSGGSISSGLLSGRSDNHGGGSDIQLTQSPSSLSASVGDRVTITCRASESVDAYGISFMNWFQQKPGKAPKLLIYAASNQGSGVPSRFSGSGSGTDFTLTISSMQPEDFATYYCQQSKDVPWTFGQGTKLEIK

SEQ ID NO: 996 - DNA, 453 bp, Artificial Sequence
  chemically synthesized
gagttttgcgctcgggattggctgccgtatcagtgctcgagttttggaggtggctcgagcggcggctctatctcttccggactgctgtccggcagatccgacaatcacggcggaggatccgatatccagctgacccagagccctagcagcctgtctgccagcgtgggcgacagagtgaccatcacctgtagagccagcgagagcgtggacgcttacggcatcagcttcatgaactggttccagcagaagcccggcaaggcccccaagctgctgatctacgccgccagcaatcagggcagcggcgtgccaagcagattttccggctctggcagcggcaccgacttcaccctgaccatcagcagcatgcagcccgaggacttcgccacctactactgccagcagagcaaggacgtgccctggacctttggccagggtaccaagctggaaatcaag

SEQ ID NO: 997 - protein, 151 aa, Artificial Sequence
  chemically synthesized
PYICSSFPLDCQAGQGGGSSGGSISSGLLSGRSDNHGGGSDIQLTQSPSSLSASVGDRVTITCRASESVDAYGISFMNWFQQKPGKAPKLLIYAASNQGSGVPSRFSGSGSGTDFTLTISSMQPEDFATYYCQQSKDVPWTFGQGTKLEIK

SEQ ID NO: 998 - DNA, 453 bp, Artificial Sequence
  chemically synthesized
ccttatatttgctctagttttccgttggattgccaggcgggtcagggaggtggctcgagcggcggctctatctcttccggactgctgtccggcagatccgacaatcacggcggaggatccgatatccagctgacccagagccctagcagcctgtctgccagcgtgggcgacagagtgaccatcacctgtagagccagcgagagcgtggacgcttacggcatcagcttcatgaactggttccagcagaagcccggcaaggcccccaagctgctgatctacgccgccagcaatcagggcagcggcgtgccaagcagattttccggctctggcagcggcaccgacttcaccctgaccatcagcagcatgcagcccgaggacttcgccacctactactgccagcagagcaaggacgtgccctggacctttggccagggtaccaagctggaaatcaag

SEQ ID NO: 999 - protein, 149 aa, Artificial Sequence
  chemically synthesized
DYTYCRWVNWCLSGVGGGSSGGSISSGLLSGRSDNHGGGSYELTQPPSASVNVGETVKITCSGDQLPKYFADWFHQRSDQTILQVIYDDNKRPSGIPERISGSSSGTTATLTIRDVRAEDEGDYYCFSGYVDSDSKLYVFGSGTQLTVL

SEQ ID NO: 1000 - DNA, 446 bp, Artificial Sequence
  chemically synthesized
gattatacgtattgccgttgggttaattggtgcttgtctggggtgggaggtggctcgagcggcggctctatctcttccggactgctgtccggcagatccgacaatcacggcggaggctcttatgagctgactcagccaccttcagcatcagtcaatgtaggagagactgtcaaaatcacctgctctggggaccaattgccgaaatattttgcagattggtttcatcaaaggtcagaccagaccattttgcaagtgatatatgatgataataagcgcccctcgggtatccctgaaagaatctctgggtccagctcagggacaacagccaccttgaccatcagagatgtccgggctgaggatgaaggtgactattactgtttctcaggatatgttgatagtgatagcaaattgtatgtttttggcagcggaacccagctcaccgtcct

SEQ ID NO: 1001 - protein, 149 aa, Artificial Sequence
  chemically synthesized
ILCPEDPWGHKCKLPGGGSSGGSISSGLLSGRSDNHGGGSYELTQPPSASVNVGETVKITCSGDQLPKYFADWFHQRSDQTILQVIYDDNKRPSGIPERISGSSSGTTATLTIRDVRAEDEGDYYCFSGYVDSDSKLYVFGSGTQLTVL

SEQ ID NO: 1002 - DNA, 447 bp, Artificial Sequence
  chemically synthesized
attctgtgcccggaggatccgtgggggcataagtgcaagctgcctggaggtggctcgagcggcggctctatctcttccggactgctgtccggcagatccgacaatcacggcggaggctcttatgagctgactcagccaccttcagcatcagtcaatgtaggagagactgtcaaaatcacctgctctggggaccaattgccgaaatattttgcagattggtttcatcaaaggtcagaccagaccattttgcaagtgatatatgatgataataagcgcccctcgggtatccctgaaagaatctctgggtccagctcagggacaacagccaccttgaccatcagagatgtccgggctgaggatgaaggtgactattactgtttctcaggatatgttgatagtgatagcaaattgtatgtttttggcagcggaacccagctcaccgtccta

SEQ ID NO: 1003 - protein, 149 aa, Artificial Sequence
  chemically synthesized
TNIWSCQTYCDHKHKGGGSSGGSISSGLLSGRSDNHGGGSYELTQPPSASVNVGETVKITCSGDQLPKYFADWFHQRSDQTILQVIYDDNKRPSGIPERISGSSSGTTATLTIRDVRAEDEGDYYCFSGYVDSDSKLYVFGSGTQLTVL

SEQ ID NO: 1004 - DNA, 447 bp, Artificial Sequence
  chemically synthesized
acgaatatttggagttgccagacttattgcgatcataagcataagggaggtggctcgagcggcggctctatctcttccggactgctgtccggcagatccgacaatcacggcggaggctcttatgagctgactcagccaccttcagcatcagtcaatgtaggagagactgtcaaaatcacctgctctggggaccaattgccgaaatattttgcagattggtttcatcaaaggtcagaccagaccattttgcaagtgatatatgatgataataagcgcccctcgggtatccctgaaagaatctctgggtccagctcagggacaacagccaccttgaccatcagagatgtccgggctgaggatgaaggtgactattactgtttctcaggatatgttgatagtgatagcaaattgtatgtttttggcagcggaacccagctcaccgtccta

SEQ ID NO: 1005 - protein, 149 aa, Artificial Sequence
  chemically synthesized
SDHKCKLQNCMNTKVGGGSSGGSISSGLLSGRSDNHGGGSYELTQPPSASVNVGETVKITCSGDQLPKYFADWFHQRSDQTILQVIYDDNKRPSGIPERISGSSSGTTATLTIRDVRAEDEGDYYCFSGYVDSDSKLYVFGSGTQLTVL

SEQ ID NO: 1006 - DNA, 447 bp, Artificial Sequence
  chemically synthesized
agtgatcataagtgcaagcttcagaattgcatgaatactaaggttggaggtggctcgagcggcggctctatctcttccggactgctgtccggcagatccgacaatcacggcggaggctcttatgagctgactcagccaccttcagcatcagtcaatgtaggagagactgtcaaaatcacctgctctggggaccaattgccgaaatattttgcagattggtttcatcaaaggtcagaccagaccattttgcaagtgatatatgatgataataagcgcccctcgggtatccctgaaagaatctctgggtccagctcagggacaacagccaccttgaccatcagagatgtccgggctgaggatgaaggtgactattactgtttctcaggatatgttgatagtgatagcaaattgtatgtttttggcagcggaacccagctcaccgtccta

SEQ ID NO: 1007 - protein, 149 aa, Artificial Sequence
  chemically synthesized
PGNCHPMQKEMCQFIGGGSSGGSISSGLLSGRSDNHGGGSYELTQPPSASVNVGETVKITCSGDQLPKYFADWFHQRSDQTILQVIYDDNKRPSGIPERISGSSSGTTATLTIRDVRAEDEGDYYCFSGYVDSDSKLYVFGSGTQLTVL

SEQ ID NO: 1008 - DNA, 447 bp, Artificial Sequence
  chemically synthesized
cctggtaattgccatcctatgcagaaggagatgtgccagtttattggaggtggctcgagcggcggctctatctcttccggactgctgtccggcagatccgacaatcacggcggaggctcttatgagctgactcagccaccttcagcatcagtcaatgtaggagagactgtcaaaatcacctgctctggggaccaattgccgaaatattttgcagattggtttcatcaaaggtcagaccagaccattttgcaagtgatatatgatgataataagcgcccctcgggtatccctgaaagaatctctgggtccagctcagggacaacagccaccttgaccatcagagatgtccgggctgaggatgaaggtgactattactgtttctcaggatatgttgatagtgatagcaaattgtatgtttttggcagcggaacccagctcaccgtccta

SEQ ID NO: 1009 - protein, 149 aa, Artificial Sequence
  chemically synthesized
VEHLCYTHNKCKHPDGGGSSGGSISSGLLSGRSDNHGGGSYELTQPPSASVNVGETVKITCSGDQLPKYFADWFHQRSDQTILQVIYDDNKRPSGIPERISGSSSGTTATLTIRDVRAEDEGDYYCFSGYVDSDSKLYVFGSGTQLTVL

SEQ ID NO: 1010 - DNA, 447 bp, Artificial Sequence
  chemically synthesized
gttgagcatttgtgctatacgcataataagtgcaagcatcctgatggaggtggctcgagcggcggctctatctcttccggactgctgtccggcagatccgacaatcacggcggaggctcttatgagctgactcagccaccttcagcatcagtcaatgtaggagagactgtcaaaatcacctgctctggggaccaattgccgaaatattttgcagattggtttcatcaaaggtcagaccagaccattttgcaagtgatatatgatgataataagcgcccctcgggtatccctgaaagaatctctgggtccagctcagggacaacagccaccttgaccatcagagatgtccgggctgaggatgaaggtgactattactgtttctcaggatatgttgatagtgatagcaaattgtatgtttttggcagcggaacccagctcaccgtccta

SEQ ID NO: 1011 - protein, 149 aa, Artificial Sequence
  chemically synthesized
TIPRCGQHPKCKDTLGGGSSGGSISSGLLSGRSDNHGGGSYELTQPPSASVNVGETVKITCSGDQLPKYFADWFHQRSDQTILQVIYDDNKRPSGIPERISGSSSGTTATLTIRDVRAEDEGDYYCFSGYVDSDSKLYVFGSGTQLTVL

SEQ ID NO: 1012 - DNA, 447 bp, Artificial Sequence
  chemically synthesized
actattccgaggtgcggtcagcatccgaagtgcaaggatactttgggaggtggctcgagcggcggctctatctcttccggactgctgtccggcagatccgacaatcacggcggaggctcttatgagctgactcagccaccttcagcatcagtcaatgtaggagagactgtcaaaatcacctgctctggggaccaattgccgaaatattttgcagattggtttcatcaaaggtcagaccagaccattttgcaagtgatatatgatgataataagcgcccctcgggtatccctgaaagaatctctgggtccagctcagggacaacagccaccttgaccatcagagatgtccgggctgaggatgaaggtgactattactgtttctcaggatatgttgatagtgatagcaaattgtatgtttttggcagcggaacccagctcaccgtccta

SEQ ID NO: 1013 - protein, 149 aa, Artificial Sequence
  chemically synthesized
ACRICQDHPKTKWNSGGGSSGGSISSGLLSGRSDNHGGGSYELTQPPSASVNVGETVKITCSGDQLPKYFADWFHQRSDQTILQVIYDDNKRPSGIPERISGSSSGTTATLTIRDVRAEDEGDYYCFSGYVDSDSKLYVFGSGTQLTVL

SEQ ID NO: 1014 - DNA, 447 bp, Artificial Sequence
  chemically synthesized
gcgtgccgtatttgtcaggatcatcctaagacgaagtggaattctggaggtggctcgagcggcggctctatctcttccggactgctgtccggcagatccgacaatcacggcggaggctcttatgagctgactcagccaccttcagcatcagtcaatgtaggagagactgtcaaaatcacctgctctggggaccaattgccgaaatattttgcagattggtttcatcaaaggtcagaccagaccattttgcaagtgatatatgatgataataagcgcccctcgggtatccctgaaagaatctctgggtccagctcagggacaacagccaccttgaccatcagagatgtccgggctgaggatgaaggtgactattactgtttctcaggatatgttgatagtgatagcaaattgtatgtttttggcagcggaacccagctcaccgtccta

SEQ ID NO: 1015 - protein, 149 aa, Artificial Sequence
  chemically synthesized
LIQCTGNLDHKCKHYGGGSSGGSISSGLLSGRSDNHGGGSYELTQPPSASVNVGETVKITCSGDQLPKYFADWFHQRSDQTILQVIYDDNKRPSGIPERISGSSSGTTATLTIRDVRAEDEGDYYCFSGYVDSDSKLYVFGSGTQLTVL

SEQ ID NO: 1016 - DNA, 446 bp, Artificial Sequence
  chemically synthesized
cttattcagtgcactggtaatcttgatcataagtgcaagcattatggaggtggctcgagcggcggctctatctcttccggactgctgtccggcagatccgacaatcacggcggaggctcttatgagctgactcagccaccttcagcatcagtcaatgtaggagagactgtcaaaatcacctgctctggggaccaattgccgaaatattttgcagattggtttcatcaaaggtcagaccagaccattttgcaagtgatatatgatgataataagcgcccctcgggtatccctgaaagaatctctgggtccagctcagggacaacagccaccttgaccatcagagatgtccgggctgaggatgaaggtgactattactgtttctcaggatatgttgatagtgatagcaaattgtatgtttttggcagcggaacccagctcaccgtcct

SEQ ID NO: 1017 - protein, 149 aa, Artificial Sequence
  chemically synthesized
IPCHHSADHKHKCTSGGGSSGGSISSGLLSGRSDNHGGGSYELTQPPSASVNVGETVKITCSGDQLPKYFADWFHQRSDQTILQVIYDDNKRPSGIPERISGSSSGTTATLTIRDVRAEDEGDYYCFSGYVDSDSKLYVFGSGTQLTVL

SEQ ID NO: 1018 - DNA, 447 bp, Artificial Sequence
  chemically synthesized
attccttgccatcatagtgctgatcataagcataagtgcacgagtggaggtggctcgagcggcggctctatctcttccggactgctgtccggcagatccgacaatcacggcggaggctcttatgagctgactcagccaccttcagcatcagtcaatgtaggagagactgtcaaaatcacctgctctggggaccaattgccgaaatattttgcagattggtttcatcaaaggtcagaccagaccattttgcaagtgatatatgatgataataagcgcccctcgggtatccctgaaagaatctctgggtccagctcagggacaacagccaccttgaccatcagagatgtccgggctgaggatgaaggtgactattactgtttctcaggatatgttgatagtgatagcaaattgtatgtttttggcagcggaacccagctcaccgtccta

SEQ ID NO: 1019 - protein, 149 aa, Artificial Sequence
  chemically synthesized
SRQICADYNCHNKYKGGGSSGGSISSGLLSGRSDNHGGGSYELTQPPSASVNVGETVKITCSGDQLPKYFADWFHQRSDQTILQVIYDDNKRPSGIPERISGSSSGTTATLTIRDVRAEDEGDYYCFSGYVDSDSKLYVFGSGTQLTVL

SEQ ID NO: 1020 - DNA, 447 bp, Artificial Sequence
  chemically synthesized
tcgcggcagatttgcgctgattataattgccataataagtataagggaggtggctcgagcggcggctctatctcttccggactgctgtccggcagatccgacaatcacggcggaggctcttatgagctgactcagccaccttcagcatcagtcaatgtaggagagactgtcaaaatcacctgctctggggaccaattgccgaaatattttgcagattggtttcatcaaaggtcagaccagaccattttgcaagtgatatatgatgataataagcgcccctcgggtatccctgaaagaatctctgggtccagctcagggacaacagccaccttgaccatcagagatgtccgggctgaggatgaaggtgactattactgtttctcaggatatgttgatagtgatagcaaattgtatgtttttggcagcggaacccagctcaccgtccta

SEQ ID NO: 1021 - protein, 149 aa, Artificial Sequence
  chemically synthesized
QPCNPQIDHKIKCIYGGGSSGGSISSGLLSGRSDNHGGGSYELTQPPSASVNVGETVKITCSGDQLPKYFADWFHQRSDQTILQVIYDDNKRPSGIPERISGSSSGTTATLTIRDVRAEDEGDYYCFSGYVDSDSKLYVFGSGTQLTVL

SEQ ID NO: 1022 - DNA, 447 bp, Artificial Sequence
  chemically synthesized
cagccttgcaatccgcagattgatcataagattaagtgcatttatggaggtggctcgagcggcggctctatctcttccggactgctgtccggcagatccgacaatcacggcggaggctcttatgagctgactcagccaccttcagcatcagtcaatgtaggagagactgtcaaaatcacctgctctggggaccaattgccgaaatattttgcagattggtttcatcaaaggtcagaccagaccattttgcaagtgatatatgatgataataagcgcccctcgggtatccctgaaagaatctctgggtccagctcagggacaacagccaccttgaccatcagagatgtccgggctgaggatgaaggtgactattactgtttctcaggatatgttgatagtgatagcaaattgtatgtttttggcagcggaacccagctcaccgtccta

SEQ ID NO: 1023 - protein, 149 aa, Artificial Sequence
  chemically synthesized
HYTICMTHNKCKDMAGGGSSGGSISSGLLSGRSDNHGGGSYELTQPPSASVNVGETVKITCSGDQLPKYFADWFHQRSDQTILQVIYDDNKRPSGIPERISGSSSGTTATLTIRDVRAEDEGDYYCFSGYVDSDSKLYVFGSGTQLTVL

SEQ ID NO: 1024 - DNA, 447 bp, Artificial Sequence
  chemically synthesized
cattatactatttgcatgacgcataataagtgcaaggatatggcgggaggtggctcgagcggcggctctatctcttccggactgctgtccggcagatccgacaatcacggcggaggctcttatgagctgactcagccaccttcagcatcagtcaatgtaggagagactgtcaaaatcacctgctctggggaccaattgccgaaatattttgcagattggtttcatcaaaggtcagaccagaccattttgcaagtgatatatgatgataataagcgcccctcgggtatccctgaaagaatctctgggtccagctcagggacaacagccaccttgaccatcagagatgtccgggctgaggatgaaggtgactattactgtttctcaggatatgttgatagtgatagcaaattgtatgtttttggcagcggaacccagctcaccgtccta

SEQ ID NO: 1025 - protein, 149 aa, Artificial Sequence
  chemically synthesized
ANSCLAVEHKCKHNYGGGSSGGSISSGLLSGRSDNHGGGSYELTQPPSASVNVGETVKITCSGDQLPKYFADWFHQRSDQTILQVIYDDNKRPSGIPERISGSSSGTTATLTIRDVRAEDEGDYYCFSGYVDSDSKLYVFGSGTQLTVL

SEQ ID NO: 1026 - DNA, 447 bp, Artificial Sequence
  chemically synthesized
gctaatagttgccttgctgttgagcataagtgcaagcataattatggaggtggctcgagcggcggctctatctcttccggactgctgtccggcagatccgacaatcacggcggaggctcttatgagctgactcagccaccttcagcatcagtcaatgtaggagagactgtcaaaatcacctgctctggggaccaattgccgaaatattttgcagattggtttcatcaaaggtcagaccagaccattttgcaagtgatatatgatgataataagcgcccctcgggtatccctgaaagaatctctgggtccagctcagggacaacagccaccttgaccatcagagatgtccgggctgaggatgaaggtgactattactgtttctcaggatatgttgatagtgatagcaaattgtatgtttttggcagcggaacccagctcaccgtccta

SEQ ID NO: 1027 - protein, 145 aa, Artificial Sequence
  chemically synthesized
HPLQKELAQFIGGGSSGGSISSGLLSGRSDNHGGGSYELTQPPSASVNVGETVKITCSGDQLPKYFADWFHQRSDQTILQVIYDDNKRPSGIPERISGSSSGTTATLTIRDVRAEDEGDYYCFSGYVDSDSKLYVFGSGTQLTVL

SEQ ID NO: 1028 - protein, 151 aa, Artificial Sequence
  chemically synthesized
TSYCSIEHYPCNTHHGGGSSGGSISSGLLSGRSDNHGGGSDIQLTQSPSSLSASVGDRVTITCRASESVDAYGISFMNWFQQKPGKAPKLLIYAASNQGSGVPSRFSGSGSGTDFTLTISSMQPEDFATYYCQQSKDVPWTFGQGTKLEIK

SEQ ID NO: 1029 - protein, 158 aa, Artificial Sequence
  chemically synthesized
QGQSGQGTSYCSIEHYPCNTHHGGGSSGGSISSGLLSGRSDNHGGGSDIQLTQSPSSLSASVGDRVTITCRASESVDAYGISFMNWFQQKPGKAPKLLIYAASNQGSGVPSRFSGSGSGTDFTLTISSMQPEDFATYYCQQSKDVPWTFGQGTKLEIK

SEQ ID NO: 1030 - DNA, 453 bp, Artificial Sequence
  chemically synthesized
acgtcatactgcagtattgagcattacccctgcaatacacatcatggaggtggctcgagcggcggctctatctcttccggactgctgtccggcagatccgacaatcacggcggaggatccgatatccagctgacccagagccctagcagcctgtctgccagcgtgggcgacagagtgaccatcacctgtagagccagcgagagcgtggacgcttacggcatcagcttcatgaactggttccagcagaagcccggcaaggcccccaagctgctgatctacgccgccagcaatcagggcagcggcgtgccaagcagattttccggctctggcagcggcaccgacttcaccctgaccatcagcagcatgcagcccgaggacttcgccacctactactgccagcagagcaaggacgtgccctggacctttggccagggtaccaagctggaaatcaag

SEQ ID NO: 1031 - DNA, 474 bp, Artificial Sequence
  chemically synthesized
caaggccagtctggccaaggtacgtcatactgcagtattgagcattacccctgcaatacacatcatggaggtggctcgagcggcggctctatctcttccggactgctgtccggcagatccgacaatcacggcggaggatccgatatccagctgacccagagccctagcagcctgtctgccagcgtgggcgacagagtgaccatcacctgtagagccagcgagagcgtggacgcttacggcatcagcttcatgaactggttccagcagaagcccggcaaggcccccaagctgctgatctacgccgccagcaatcagggcagcggcgtgccaagcagattttccggctctggcagcggcaccgacttcaccctgaccatcagcagcatgcagcccgaggacttcgccacctactactgccagcagagcaaggacgtgccctggacctttggccagggtaccaagctggaaatcaag

SEQ ID NO: 1032 - protein, 149 aa, Artificial Sequence
  chemically synthesized
ACRICQDHPATKWNSGGGSSGGSISSGLLSGRSDNHGGGSYELTQPPSASVNVGETVKITCSGDQLPKYFADWFHQRSDQTILQVIYDDNKRPSGIPERISGSSSGTTATLTIRDVRAEDEGDYYCFSGYVDSDSKLYVFGSGTQLTVL

SEQ ID NO: 1033 - DNA, 761 bp, Artificial Sequence
  chemically synthesized
gcgtgccgtatttgtcaggatcatcctgcgacgaagtggaattctggaggtggctcgagcggcggctctatctcttccggactgctgtccggcagatccgacaatcacggcggaggctctacgagctgacccagcctcctagcgcctccgtgaatgtgggcgagacagtgaagatcacctgtagcggcgaccagctgcccaagtacttcgccgactggttccaccagcggagcgaccagacaatcctgcaagtgatctacgacgacaacaagcggcccagcggcatccccgagagaatcagcggaagcagcagcggcaccaccgccaccctgaccattagagatgtgcgggccgaggacgagggcgactactactgctttagcggctacgtggacagcgacagcaagctgtacgtgttcggctccggtacccagctgacagtgctgggcggacctaagagcagccccaaagtgaccgtgttccccccaagccccgaggaactgaggaccaacaaggccaccctcgtgtgcctcgtgaacgacttctaccctggcagcgccaccgtgacctggaaagccaatggcgccaccatcaacgacggcgtgaaaaccaccaagcccagcaagcagggccagaactacatgaccagcagctacctgagcctgaccgccgaccagtggaagtcccacaacagagtgtcctgccaagtgacccacgagggggaaaccgtggaaaagagcctgagccctgccgagtgcctg

SEQ ID NO: 1034 - protein, 143 aa, Artificial Sequence
  chemically synthesized
DAPKTKWNSGGGSSGGSISSGLLSGRSDNHGGGSYELTQPPSASVNVGETVKITCSGDQLPKYFADWFHQRSDQTILQVIYDDNKRPSGIPERISGSSSGTTATLTIRDVRAEDEGDYYCFSGYVDSDSKLYVFGSGTQLTVL

SEQ ID NO: 1035 - DNA, 744 bp, Artificial Sequence
  chemically synthesized
gatgctcctaagacgaagtggaattctggaggtggctcgagcggcggctctatctcttccggactgctgtccggcagatccgacaatcacggcggaggctcttacgagctgacccagcctcctagcgcctccgtgaatgtgggcgagacagtgaagatcacctgtagcggcgaccagctgcccaagtacttcgccgactggttccaccagcggagcgaccagacaatcctgcaagtgatctacgacgacaacaagcggcccagcggcatccccgagagaatcagcggaagcagcagcggcaccaccgccaccctgaccattagagatgtgcgggccgaggacgagggcgactactactgctttagcggctacgtggacagcgacagcaagctgtacgtgttcggctccggtacccagctgacagtgctgggcggacctaagagcagccccaaagtgaccgtgttccccccaagccccgaggaactgaggaccaacaaggccaccctcgtgtgcctcgtgaacgacttctaccctggcagcgccaccgtgacctggaaagccaatggcgccaccatcaacgacggcgtgaaaaccaccaagcccagcaagcagggccagaactacatgaccagcagctacctgagcctgaccgccgaccagtggaagtcccacaacagagtgtcctgccaagtgacccacgagggggaaaccgtggaaaagagcctgagccctgccgagtgcctg

SEQ ID NO: 1036 - protein, 143 aa, Artificial Sequence
  chemically synthesized
DAPATKWNSGGGSSGGSISSGLLSGRSDNHGGGSYELTQPPSASVNVGETVKITCSGDQLPKYFADWFHQRSDQTILQVIYDDNKRPSGIPERISGSSSGTTATLTIRDVRAEDEGDYYCFSGYVDSDSKLYVFGSGTQLTVL

SEQ ID NO: 1037 - DNA, 744 bp, Artificial Sequence
  chemically synthesized
gatgctcctgcgacgaagtggaattctggaggtggctcgagcggcggctctatctcttccggactgctgtccggcagatccgacaatcacggcggaggctcttacgagctgacccagcctcctagcgcctccgtgaatgtgggcgagacagtgaagatcacctgtagcggcgaccagctgcccaagtacttcgccgactggttccaccagcggagcgaccagacaatcctgcaagtgatctacgacgacaacaagcggcccagcggcatccccgagagaatcagcggaagcagcagcggcaccaccgccaccctgaccattagagatgtgcgggccgaggacgagggcgactactactgctttagcggctacgtggacagcgacagcaagctgtacgtgttcggctccggtacccagctgacagtgctgggcggacctaagagcagccccaaagtgaccgtgttccccccaagccccgaggaactgaggaccaacaaggccaccctcgtgtgcctcgtgaacgacttctaccctggcagcgccaccgtgacctggaaagccaatggcgccaccatcaacgacggcgtgaaaaccaccaagcccagcaagcagggccagaactacatgaccagcagctacctgagcctgaccgccgaccagtggaagtcccacaacagagtgtcctgccaagtgacccacgagggggaaaccgtggaaaagagcctgagccctgccgagtgcctg

SEQ ID NO: 1038 - DNA, 750 bp, Artificial Sequence
  chemically synthesized
catcctctgcagaaggagctggcccagtttattggaggtggctcgagcggcggctctatctcttccggactgctgtccggcagatccgacaatcacggcggaggctcttacgagctgacccagcctcctagcgcctccgtgaatgtgggcgagacagtgaagatcacctgtagcggcgaccagctgcccaagtacttcgccgactggttccaccagcggagcgaccagacaatcctgcaagtgatctacgacgacaacaagcggcccagcggcatccccgagagaatcagcggaagcagcagcggcaccaccgccaccctgaccattagagatgtgcgggccgaggacgagggcgactactactgctttagcggctacgtggacagcgacagcaagctgtacgtgttcggctccggtacccagctgacagtgctgggcggacctaagagcagccccaaagtgaccgtgttccccccaagccccgaggaactgaggaccaacaaggccaccctcgtgtgcctcgtgaacgacttctaccctggcagcgccaccgtgacctggaaagccaatggcgccaccatcaacgacggcgtgaaaaccaccaagcccagcaagcagggccagaactacatgaccagcagctacctgagcctgaccgccgaccagtggaagtcccacaacagagtgtcctgccaagtgacccacgagggggaaaccgtggaaaagagcctgagccctgccgagtgcctg

SEQ ID NO: 1039 - protein, 142 aa, Artificial Sequence
  chemically synthesized
HPQSKDTLGGGSSGGSISSGLLSGRSDNHGGGSYELTQPPSASVNVGETVKITCSGDQLPKYFADWFHQRSDQTILQVIYDDNKRPSGIPERISGSSSGTTATLTIRDVRAEDEGDYYCFSGYVDSDSKLYVFGSGTQLTVL

SEQ ID NO: 1040 - protein, 7 aa, Artificial Sequence
  chemically synthesized
GGGSSGG

SEQ ID NO: 1041 - protein, 151 aa, Artificial Sequence; identical to SEQ ID NO: 919
  chemically synthesized

SEQ ID NO: 1042 - protein, 151 aa, Artificial Sequence; identical to SEQ ID NO: 921
  chemically synthesized

SEQ ID NO: 1043 - protein, 151 aa, Artificial Sequence; identical to SEQ ID NO: 923
  chemically synthesized

SEQ ID NO: 1044 - protein, 151 aa, Artificial Sequence; identical to SEQ ID NO: 925
  chemically synthesized

SEQ ID NO: 1045 - protein, 151 aa, Artificial Sequence; identical to SEQ ID NO: 927
  chemically synthesized

SEQ ID NO: 1046 - protein, 151 aa, Artificial Sequence; identical to SEQ ID NO: 929
  chemically synthesized

SEQ ID NO: 1047 - protein, 151 aa, Artificial Sequence; identical to SEQ ID NO: 931
  chemically synthesized

SEQ ID NO: 1048 - protein, 151 aa, Artificial Sequence; identical to SEQ ID NO: 933
  chemically synthesized

SEQ ID NO: 1049 - protein, 151 aa, Artificial Sequence; identical to SEQ ID NO: 935
  chemically synthesized

SEQ ID NO: 1050 - protein, 151 aa, Artificial Sequence; identical to SEQ ID NO: 937
  chemically synthesized

SEQ ID NO: 1051 - protein, 151 aa, Artificial Sequence; identical to SEQ ID NO: 939
  chemically synthesized

SEQ ID NO: 1052 - protein, 151 aa, Artificial Sequence; identical to SEQ ID NO: 943
  chemically synthesized

SEQ ID NO: 1053 - protein, 151 aa, Artificial Sequence; identical to SEQ ID NO: 945
  chemically synthesized

SEQ ID NO: 1054 - protein, 151 aa, Artificial Sequence; identical to SEQ ID NO: 947
  chemically synthesized

SEQ ID NO: 1055 - protein, 151 aa, Artificial Sequence; identical to SEQ ID NO: 949
  chemically synthesized

SEQ ID NO: 1056 - protein, 151 aa, Artificial Sequence; identical to SEQ ID NO: 951
  chemically synthesized

SEQ ID NO: 1057 - protein, 151 aa, Artificial Sequence; identical to SEQ ID NO: 955
  chemically synthesized

SEQ ID NO: 1058 - protein, 151 aa, Artificial Sequence; identical to SEQ ID NO: 957
  chemically synthesized

SEQ ID NO: 1059 - protein, 151 aa, Artificial Sequence; identical to SEQ ID NO: 959
  chemically synthesized

SEQ ID NO: 1060 - protein, 151 aa, Artificial Sequence; identical to SEQ ID NO: 961
  chemically synthesized

SEQ ID NO: 1061 - protein, 151 aa, Artificial Sequence; identical to SEQ ID NO: 963
  chemically synthesized

SEQ ID NO: 1062 - protein, 151 aa, Artificial Sequence; identical to SEQ ID NO: 941
  chemically synthesized

SEQ ID NO: 1063 - protein, 151 aa, Artificial Sequence; identical to SEQ ID NO: 969
  chemically synthesized

SEQ ID NO: 1064 - protein, 151 aa, Artificial Sequence; identical to SEQ ID NO: 971
  chemically synthesized

SEQ ID NO: 1065 - protein, 150 aa, Artificial Sequence; identical to SEQ ID NO: 973
  chemically synthesized

SEQ ID NO: 1066 - protein, 151 aa, Artificial Sequence; identical to SEQ ID NO: 975
  chemically synthesized

SEQ ID NO: 1067 - protein, 151 aa, Artificial Sequence; identical to SEQ ID NO: 977
  chemically synthesized

SEQ ID NO: 1068 - protein, 154 aa, Artificial Sequence; identical to SEQ ID NO: 979
  chemically synthesized

SEQ ID NO: 1069 - protein, 154 aa, Artificial Sequence; identical to SEQ ID NO: 981
  chemically synthesized

SEQ ID NO: 1070 - protein, 154 aa, Artificial Sequence; identical to SEQ ID NO: 983
  chemically synthesized

SEQ ID NO: 1071 - protein, 151 aa, Artificial Sequence; identical to SEQ ID NO: 985
  chemically synthesized

SEQ ID NO: 1072 - protein, 151 aa, Artificial Sequence; identical to SEQ ID NO: 987
  chemically synthesized

SEQ ID NO: 1073 - protein, 151 aa, Artificial Sequence; identical to SEQ ID NO: 989
  chemically synthesized

SEQ ID NO: 1074 - protein, 151 aa, Artificial Sequence; identical to SEQ ID NO: 993
  chemically synthesized

SEQ ID NO: 1075 - protein, 151 aa, Artificial Sequence; identical to SEQ ID NO: 995
  chemically synthesized

SEQ ID NO: 1076 - protein, 151 aa, Artificial Sequence; identical to SEQ ID NO: 997
  chemically synthesized

SEQ ID NO: 1077 - protein, 149 aa, Artificial Sequence; identical to SEQ ID NO: 999
  chemically synthesized

SEQ ID NO: 1078 - protein, 149 aa, Artificial Sequence; identical to SEQ ID NO: 1001
  chemically synthesized

SEQ ID NO: 1079 - protein, 149 aa, Artificial Sequence; identical to SEQ ID NO: 1003
  chemically synthesized

SEQ ID NO: 1080 - protein, 149 aa, Artificial Sequence; identical to SEQ ID NO: 1005
  chemically synthesized

SEQ ID NO: 1081 - protein, 149 aa, Artificial Sequence; identical to SEQ ID NO: 1007
  chemically synthesized

SEQ ID NO: 1082 - protein, 149 aa, Artificial Sequence; identical to SEQ ID NO: 1009
  chemically synthesized

SEQ ID NO: 1083 - protein, 149 aa, Artificial Sequence; identical to SEQ ID NO: 1011
  chemically synthesized

SEQ ID NO: 1084 - protein, 149 aa, Artificial Sequence; identical to SEQ ID NO: 1013
  chemically synthesized

SEQ ID NO: 1085 - protein, 149 aa, Artificial Sequence; identical to SEQ ID NO: 1015
  chemically synthesized

SEQ ID NO: 1086 - protein, 149 aa, Artificial Sequence; identical to SEQ ID NO: 1017
  chemically synthesized

SEQ ID NO: 1087 - protein, 149 aa, Artificial Sequence; identical to SEQ ID NO: 1019
  chemically synthesized

SEQ ID NO: 1088 - protein, 149 aa, Artificial Sequence; identical to SEQ ID NO: 1021
  chemically synthesized

SEQ ID NO: 1089 - protein, 149 aa, Artificial Sequence; identical to SEQ ID NO: 1023
  chemically synthesized

SEQ ID NO: 1090 - protein, 149 aa, Artificial Sequence; identical to SEQ ID NO: 1025
  chemically synthesized

SEQ ID NO: 1091 - protein, 20 aa, Artificial Sequence
  chemically synthesized
ISSGLLSSGGSGGSLSGRNH

SEQ ID NO: 1092 - protein, 15 aa, Artificial Sequence
  chemically synthesized
ISSGLLSGRSANPRG

SEQ ID NO: 1093 - protein, 18 aa, Artificial Sequence
  chemically synthesized
AVGLLAPPTSGRSANPRG

SEQ ID NO: 1094 - protein, 17 aa, Artificial Sequence
  chemically synthesized
AVGLLAPPSGRSANPRG

SEQ ID NO: 1095 - protein, 13 aa, Artificial Sequence
  chemically synthesized
ISSGLLSGRSDDH

SEQ ID NO: 1096 - protein, 13 aa, Artificial Sequence
  chemically synthesized
ISSGLLSGRSDIH

SEQ ID NO: 1097 - protein, 13 aa, Artificial Sequence
  chemically synthesized
ISSGLLSGRSDQH

SEQ ID NO: 1098 - protein, 13 aa, Artificial Sequence
  chemically synthesized
ISSGLLSGRSDTH

SEQ ID NO: 1099 - protein, 13 aa, Artificial Sequence
  chemically synthesized
ISSGLLSGRSDYH

SEQ ID NO: 1100 - protein, 13 aa, Artificial Sequence
  chemically synthesized
ISSGLLSGRSDNP

SEQ ID NO: 1101 - protein, 13 aa, Artificial Sequence
  chemically synthesized
ISSGLLSGRSANP

SEQ ID NO: 1102 - protein, 13 aa, Artificial Sequence
  chemically synthesized
ISSGLLSGRSANI

SEQ ID NO: 1103 - protein, 18 aa, Artificial Sequence
  chemically synthesized
AVGLLAPPGGLSGRSDDH

SEQ ID NO: 1104 - protein, 18 aa, Artificial Sequence
  chemically synthesized
AVGLLAPPGGLSGRSDIH

SEQ ID NO: 1105 - protein, 18 aa, Artificial Sequence
  chemically synthesized
AVGLLAPPGGLSGRSDQH

SEQ ID NO: 1106 - protein, 18 aa, Artificial Sequence
  chemically synthesized
AVGLLAPPGGLSGRSDTH

SEQ ID NO: 1107 - protein, 18 aa, Artificial Sequence
  chemically synthesized
AVGLLAPPGGLSGRSDYH

SEQ ID NO: 1108 - protein, 18 aa, Artificial Sequence
  chemically synthesized
AVGLLAPPGGLSGRSDNP

SEQ ID NO: 1109 - protein, 18 aa, Artificial Sequence
  chemically synthesized
AVGLLAPPGGLSGRSANP

SEQ ID NO: 1110 - protein, 18 aa, Artificial Sequence
  chemically synthesized
AVGLLAPPGGLSGRSANI

SEQ ID NO: 1111 - protein, 13 aa, Artificial Sequence
  chemically synthesized
ISSGLLSGRSDNI

SEQ ID NO: 1112 - protein, 18 aa, Artificial Sequence
  chemically synthesized
AVGLLAPPGGLSGRSDNI

SEQ ID NO: 1113 - protein, 145 aa, Artificial Sequence; identical to SEQ ID NO: 1027
  chemically synthesized

SEQ ID NO: 1114 - protein, 142 aa, Artificial Sequence; identical to SEQ ID NO: 1039
  chemically synthesized

SEQ ID NO: 1115 - protein, 142 aa, Artificial Sequence
  chemically synthesized
HPASKDTLGGGSSGGSISSGLLSGRSDNHGGGSYELTQPPSASVNVGETVKITCSGDQLPKYFADWFHQRSDQTILQVIYDDNKRPSGIPERISGSSSGTTATLTIRDVRAEDEGDYYCFSGYVDSDSKLYVFGSGTQLTVL

SEQ ID NO: 1116 - protein, 149 aa, Artificial Sequence; identical to SEQ ID NO: 1032
  chemically synthesized

SEQ ID NO: 1117 - protein, 143 aa, Artificial Sequence; identical to SEQ ID NO: 1034
  chemically synthesized

SEQ ID NO: 1118 - protein, 143 aa, Artificial Sequence; identical to SEQ ID NO: 1036
  chemically synthesized

SEQ ID NO: 1119 - protein, 150 aa, Artificial Sequence
  chemically synthesized
ACRICQDHPATKWNSGGGSSGGSISSGLLSGRSANPRGGGSYELTQPPSASVNVGETVKITCSGDQLPKYFADWFHQRSDQTILQVIYDDNKRPSGIPERISGSSSGTTATLTIRDVRAEDEGDYYCFSGYVDSDSKLYVFGSGTQLTVL

SEQ ID NO: 1120 - protein, 157 aa, Artificial Sequence
  chemically synthesized
QGQSGQGACRICQDHPATKWNSGGGSSGGSISSGLLSGRSANPRGGGSYELTQPPSASVNVGETVKITCSGDQLPKYFADWFHQRSDQTILQVIYDDNKRPSGIPERISGSSSGTTATLTIRDVRAEDEGDYYCFSGYVDSDSKLYVFGSGTQLTVL

SEQ ID NO: 1121 - DNA, 450 bp, Artificial Sequence
  chemically synthesized
gcgtgccgtatttgtcaggatcatcctgcgacgaagtggaattctggaggtggctcgagcggcggctctatctcttccggactgctgtccggcagatccgccaatcctcgtggcggaggatcctacgagctgacccagcctcctagcgcctccgtgaatgtgggcgagacagtgaagatcacctgtagcggcgaccagctgcccaagtacttcgccgactggttccaccagcggagcgaccagacaatcctgcaagtgatctacgacgacaacaagcggcccagcggcatccccgagagaatcagcggaagcagcagcggcaccaccgccaccctgaccattagagatgtgcgggccgaggacgagggcgactactactgctttagcggctacgtggacagcgacagcaagctgtacgtgttcggctccggtacccagctgacagtgctg

SEQ ID NO: 1122 - DNA, 471 bp, Artificial Sequence
  chemically synthesized
caaggccagtctggccaaggtgcgtgccgtatttgtcaggatcatcctgcgacgaagtggaattctggaggtggctcgagcggcggctctatctcttccggactgctgtccggcagatccgccaatcctcgtggcggaggatcctacgagctgacccagcctcctagcgcctccgtgaatgtgggcgagacagtgaagatcacctgtagcggcgaccagctgcccaagtacttcgccgactggttccaccagcggagcgaccagacaatcctgcaagtgatctacgacgacaacaagcggcccagcggcatccccgagagaatcagcggaagcagcagcggcaccaccgccaccctgaccattagagatgtgcgggccgaggacgagggcgactactactgctttagcggctacgtggacagcgacagcaagctgtacgtgttcggctccggtacccagctgacagtgctg

SEQ ID NO: 1123 - protein, 151 aa, Artificial Sequence
  chemically synthesized
ACRICQDHPATKWNSGGGSSGGAVGLLAPPSGRSANPRGGGSYELTQPPSASVNVGETVKITCSGDQLPKYFADWFHQRSDQTILQVIYDDNKRPSGIPERISGSSSGTTATLTIRDVRAEDEGDYYCFSGYVDSDSKLYVFGSGTQLTVL

SEQ ID NO: 1124 - protein, 158 aa, Artificial Sequence
  chemically synthesized
QGQSGQGACRICQDHPATKWNSGGGSSGGAVGLLAPPSGRSANPRGGGSYELTQPPSASVNVGETVKITCSGDQLPKYFADWFHQRSDQTILQVIYDDNKRPSGIPERISGSSSGTTATLTIRDVRAEDEGDYYCFSGYVDSDSKLYVFGSGTQLTVL

SEQ ID NO: 1125 - DNA, 21 bp, Artificial Sequence
  chemically synthesized
caggggcaatctggccagggg

SEQ ID NO: 1126 - DNA, 21 bp, Artificial Sequence
  chemically synthesized
caaggccagtctggccaagga

SEQ ID NO: 1127 - protein, 149 aa, Artificial Sequence
  chemically synthesized
ACRICQDHPATKWNSGGGSSGGSISSGLLSGRSDGHGGGSYELTQPPSASVNVGETVKITCSGDQLPKYFADWFHQRSDQTILQVIYDDNKRPSGIPERISGSSSGTTATLTIRDVRAEDEGDYYCFSGYVDSDSKLYVFGSGTQLTVL

SEQ ID NO: 1128 - protein, 156 aa, Artificial Sequence
  chemically synthesized
QGQSGQGACRICQDHPATKWNSGGGSSGGSISSGLLSGRSDGHGGGSYELTQPPSASVNVGETVKITCSGDQLPKYFADWFHQRSDQTILQVIYDDNKRPSGIPERISGSSSGTTATLTIRDVRAEDEGDYYCFSGYVDSDSKLYVFGSGTQLTVL

SEQ ID NO: 1129 - DNA, 447 bp, Artificial Sequence
  chemically synthesized
gcgtgccgtatttgtcaggatcatcctgcgacgaagtggaattctggaggtggctcgagcggcggctctatctcttccggactgctgtccggcagatccgaccagcacggcggaggatcctacgagctgacccagcctcctagcgcctccgtgaatgtgggcgagacagtgaagatcacctgtagcggcgaccagctgcccaagtacttcgccgactggttccaccagcggagcgaccagacaatcctgcaagtgatctacgacgacaacaagcggcccagcggcatccccgagagaatcagcggaagcagcagcggcaccaccgccaccctgaccattagagatgtgcgggccgaggacgagggcgactactactgctttagcggctacgtggacagcgacagcaagctgtacgtgttcggctccggtacccagctgacagtgctg

SEQ ID NO: 1130 - DNA, 468 bp, Artificial Sequence
  chemically synthesized
caaggccagtctggccaaggtgcgtgccgtatttgtcaggatcatcctgcgacgaagtggaattctggaggtggctcgagcggcggctctatctcttccggactgctgtccggcagatccgaccagcacggcggaggatcctacgagctgacccagcctcctagcgcctccgtgaatgtgggcgagacagtgaagatcacctgtagcggcgaccagctgcccaagtacttcgccgactggttccaccagcggagcgaccagacaatcctgcaagtgatctacgacgacaacaagcggcccagcggcatccccgagagaatcagcggaagcagcagcggcaccaccgccaccctgaccattagagatgtgcgggccgaggacgagggcgactactactgctttagcggctacgtggacagcgacagcaagctgtacgtgttcggctccggtacccagctgacagtgctg

SEQ ID NO: 1131 - protein, 149 aa, Artificial Sequence
  chemically synthesized
ACRICQDHPATKWNSGGGSSGGSISSGLLSGRSANPGGGSYELTQPPSASVNVGETVKITCSGDQLPKYFADWFHQRSDQTILQVIYDDNKRPSGIPERISGSSSGTTATLTIRDVRAEDEGDYYCFSGYVDSDSKLYVFGSGTQLTVL

SEQ ID NO: 1132 - protein, 156 aa, Artificial Sequence
  chemically synthesized
QGQSGQGACRICQDHPATKWNSGGGSSGGSISSGLLSGRSANPGGGSYELTQPPSASVNVGETVKITCSGDQLPKYFADWFHQRSDQTILQVIYDDNKRPSGIPERISGSSSGTTATLTIRDVRAEDEGDYYCFSGYVDSDSKLYVFGSGTQLTVL

SEQ ID NO: 1133 - DNA, 468 bp, Artificial Sequence
  chemically synthesized
caaggccagtctggccaaggtgcgtgccgtatttgtcaggatcatcctgcgacgaagtggaattctggaggtggctcgagcggcggctctatctcttccggactgctgtccggcagatccgctaatcccggcggaggatcctacgagctgacccagcctcctagcgcctccgtgaatgtgggcgagacagtgaagatcacctgtagcggcgaccagctgcccaagtacttcgccgactggttccaccagcggagcgaccagacaatcctgcaagtgatctacgacgacaacaagcggcccagcggcatccccgagagaatcagcggaagcagcagcggcaccaccgccaccctgaccattagagatgtgcgggccgaggacgagggcgactactactgctttagcggctacgtggacagcgacagcaagctgtacgtgttcggctccggtacccagctgacagtgctg

SEQ ID NO: 1134 - protein, 149 aa, Artificial Sequence
  chemically synthesized
ACRICQDHPATKWNSGGGSSGGSISSGLLSGRSDNPGGGSYELTQPPSASVNVGETVKITCSGDQLPKYFADWFHQRSDQTILQVIYDDNKRPSGIPERISGSSSGTTATLTIRDVRAEDEGDYYCFSGYVDSDSKLYVFGSGTQLTVL

SEQ ID NO: 1135 - protein, 156 aa, Artificial Sequence
  chemically synthesized
QGQSGQGACRICQDHPATKWNSGGGSSGGSISSGLLSGRSDNPGGGSYELTQPPSASVNVGETVKITCSGDQLPKYFADWFHQRSDQTILQVIYDDNKRPSGIPERISGSSSGTTATLTIRDVRAEDEGDYYCFSGYVDSDSKLYVFGSGTQLTVL

SEQ ID NO: 1136 - DNA, 447 bp, Artificial Sequence
  chemically synthesized
gcgtgccgtatttgtcaggatcatcctgcgacgaagtggaattctggaggtggctcgagcggcggctctatctcttccggactgctgtccggcagatccgacaatcccggcggaggatcctacgagctgacccagcctcctagcgcctccgtgaatgtgggcgagacagtgaagatcacctgtagcggcgaccagctgcccaagtacttcgccgactggttccaccagcggagcgaccagacaatcctgcaagtgatctacgacgacaacaagcggcccagcggcatccccgagagaatcagcggaagcagcagcggcaccaccgccaccctgaccattagagatgtgcgggccgaggacgagggcgactactactgctttagcggctacgtggacagcgacagcaagctgtacgtgttcggctccggtacccagctgacagtgctg

SEQ ID NO: 1137 - DNA, 468 bp, Artificial Sequence
  chemically synthesized
caaggccagtctggccaaggtgcgtgccgtatttgtcaggatcatcctgcgacgaagtggaattctggaggtggctcgagcggcggctctatctcttccggactgctgtccggcagatccgacaatcccggcggaggatcctacgagctgacccagcctcctagcgcctccgtgaatgtgggcgagacagtgaagatcacctgtagcggcgaccagctgcccaagtacttcgccgactggttccaccagcggagcgaccagacaatcctgcaagtgatctacgacgacaacaagcggcccagcggcatccccgagagaatcagcggaagcagcagcggcaccaccgccaccctgaccattagagatgtgcgggccgaggacgagggcgactactactgctttagcggctacgtggacagcgacagcaagctgtacgtgttcggctccggtacccagctgacagtgctg

SEQ ID NO: 1138 - protein, 152 aa, Artificial Sequence
  chemically synthesized
AMSGCSWSAFCPYLAGGGSSGGSISSGLLSGRSANPRGGGSDIQLTQSPSSLSASVGDRVTITCRASESVDAYGISFMNWFQQKPGKAPKLLIYAASNQGSGVPSRFSGSGSGTDFTLTISSMQPEDFATYYCQQSKDVPWTFGQGTKLEIK

SEQ ID NO: 1139 - protein, 159 aa, Artificial Sequence
  chemically synthesized
QGQSGQGAMSGCSWSAFCPYLAGGGSSGGSISSGLLSGRSANPRGGGSDIQLTQSPSSLSASVGDRVTITCRASESVDAYGISFMNWFQQKPGKAPKLLIYAASNQGSGVPSRFSGSGSGTDFTLTISSMQPEDFATYYCQQSKDVPWTFGQGTKLEIK

SEQ ID NO: 1140 - protein, 10 aa, Artificial Sequence
  chemically synthesized
GDSISSTAYH

SEQ ID NO: 1141 - DNA, 456 bp, Artificial Sequence
  chemically synthesized
gcgatgagtgggtgctcgtggtctgctttttgcccgtatttggcgggaggtggctcgagcggcggctctatctcttccggactgctgtccggcagatccgccaatcctcgtggcggaggatccgatatccagctgacccagagccctagcagcctgtctgccagcgtgggcgacagagtgaccatcacctgtagagccagcgagagcgtggacgcttacggcatcagcttcatgaactggttccagcagaagcccggcaaggcccccaagctgctgatctacgccgccagcaatcagggcagcggcgtgccaagcagattttccggctctggcagcggcaccgacttcaccctgaccatcagcagcatgcagcccgaggacttcgccacctactactgccagcagagcaaggacgtgccctggacctttggccagggtaccaagctggaaatcaag

SEQ ID NO: 1142 - DNA, 477 bp, Artificial Sequence
  chemically synthesized
caaggccagtctggccaaggtgcgatgagtgggtgctcgtggtctgctttttgcccgtatttggcgggaggtggctcgagcggcggctctatctcttccggactgctgtccggcagatccgccaatcctcgtggcggaggatccgatatccagctgacccagagccctagcagcctgtctgccagcgtgggcgacagagtgaccatcacctgtagagccagcgagagcgtggacgcttacggcatcagcttcatgaactggttccagcagaagcccggcaaggcccccaagctgctgatctacgccgccagcaatcagggcagcggcgtgccaagcagattttccggctctggcagcggcaccgacttcaccctgaccatcagcagcatgcagcccgaggacttcgccacctactactgccagcagagcaaggacgtgccctggacctttggccagggtaccaagctggaaatcaag

SEQ ID NO: 1143 - protein, 157 aa, Artificial Sequence
  chemically synthesized
QGQSGQGAMSGCSWSAFCPYLGGGSSGGSISSGLLSGRSANPGGGSDIQLTQSPSSLSASVGDRVTITCRASESVDAYGISFMNWFQQKPGKAPKLLIYAASNQGSGVPSRFSGSGSGTDFTLTISSMQPEDFATYYCQQSKDVPWTFGQGTKLEIK

SEQ ID NO: 1144 - protein, 150 aa, Artificial Sequence
  chemically synthesized
AMSGCSWSAFCPYLGGGSSGGSISSGLLSGRSANPGGGSDIQLTQSPSSLSASVGDRVTITCRASESVDAYGISFMNWFQQKPGKAPKLLIYAASNQGSGVPSRFSGSGSGTDFTLTISSMQPEDFATYYCQQSKDVPWTFGQGTKLEIK

SEQ ID NO: 1145 - DNA, 453 bp, Artificial Sequence
  chemically synthesized
gcgatgagtgggtgctcgtggtctgctttttgcccgtatttggcgggaggtggctcgagcggcggctctatctcttccggactgctgtccggcagatccgctaatcccggcggaggatccgatatccagctgacccagagccctagcagcctgtctgccagcgtgggcgacagagtgaccatcacctgtagagccagcgagagcgtggacgcttacggcatcagcttcatgaactggttccagcagaagcccggcaaggcccccaagctgctgatctacgccgccagcaatcagggcagcggcgtgccaagcagattttccggctctggcagcggcaccgacttcaccctgaccatcagcagcatgcagcccgaggacttcgccacctactactgccagcagagcaaggacgtgccctggacctttggccagggtaccaagctggaaatcaag

SEQ ID NO: 1146 - DNA, 474 bp, Artificial Sequence
  chemically synthesized
caaggccagtctggccaaggtgcgatgagtgggtgctcgtggtctgctttttgcccgtatttggcgggaggtggctcgagcggcggctctatctcttccggactgctgtccggcagatccgctaatcccggcggaggatccgatatccagctgacccagagccctagcagcctgtctgccagcgtgggcgacagagtgaccatcacctgtagagccagcgagagcgtggacgcttacggcatcagcttcatgaactggttccagcagaagcccggcaaggcccccaagctgctgatctacgccgccagcaatcagggcagcggcgtgccaagcagattttccggctctggcagcggcaccgacttcaccctgaccatcagcagcatgcagcccgaggacttcgccacctactactgccagcagagcaaggacgtgccctggacctttggccagggtaccaagctggaaatcaag

SEQ ID NO: 1147 - protein, 157 aa, Artificial Sequence
  chemically synthesized
QGQSGQGAMSGCSWSAFCPYLGGGSSGGSISSGLLSGRSDNPGGGSDIQLTQSPSSLSASVGDRVTITCRASESVDAYGISFMNWFQQKPGKAPKLLIYAASNQGSGVPSRFSGSGSGTDFTLTISSMQPEDFATYYCQQSKDVPWTFGQGTKLEIK

SEQ ID NO: 1148 - protein, 150 aa, Artificial Sequence
  chemically synthesized
AMSGCSWSAFCPYLGGGSSGGSISSGLLSGRSDNPGGGSDIQLTQSPSSLSASVGDRVTITCRASESVDAYGISFMNWFQQKPGKAPKLLIYAASNQGSGVPSRFSGSGSGTDFTLTISSMQPEDFATYYCQQSKDVPWTFGQGTKLEIK

SEQ ID NO: 1149 - DNA, 453 bp, Artificial Sequence
  chemically synthesized
gcgatgagtgggtgctcgtggtctgctttttgcccgtatttggcgggaggtggctcgagcggcggctctatctcttccggactgctgtccggcagatccgacaatcccggcggaggatccgatatccagctgacccagagccctagcagcctgtctgccagcgtgggcgacagagtgaccatcacctgtagagccagcgagagcgtggacgcttacggcatcagcttcatgaactggttccagcagaagcccggcaaggcccccaagctgctgatctacgccgccagcaatcagggcagcggcgtgccaagcagattttccggctctggcagcggcaccgacttcaccctgaccatcagcagcatgcagcccgaggacttcgccacctactactgccagcagagcaaggacgtgccctggacctttggccagggtaccaagctggaaatcaag

SEQ ID NO: 1150 - DNA, 474 bp, Artificial Sequence
  chemically synthesized
caaggccagtctggccaaggtgcgatgagtgggtgctcgtggtctgctttttgcccgtatttggcgggaggtggctcgagcggcggctctatctcttccggactgctgtccggcagatccgacaatcccggcggaggatccgatatccagctgacccagagccctagcagcctgtctgccagcgtgggcgacagagtgaccatcacctgtagagccagcgagagcgtggacgcttacggcatcagcttcatgaactggttccagcagaagcccggcaaggcccccaagctgctgatctacgccgccagcaatcagggcagcggcgtgccaagcagattttccggctctggcagcggcaccgacttcaccctgaccatcagcagcatgcagcccgaggacttcgccacctactactgccagcagagcaaggacgtgccctggacctttggccagggtaccaagctggaaatcaag

SEQ ID NO: 1151 - protein, 158 aa, Artificial Sequence; identical to SEQ ID NO: 1029
  chemically synthesized

SEQ ID NO: 1152 - protein, 151 aa, Artificial Sequence; identical to SEQ ID NO: 1028
  chemically synthesized

SEQ ID NO: 1153 - DNA, 453 bp, Artificial Sequence
  chemically synthesized
acgtcttactgcagtattgagcattacccctgcaatacacatcatggaggtggctcgagcggcggctctatctcttccggactgctgtccggcagatccgacaatcacggcggaggatccgatatccagctgacccagagccctagcagcctgtctgccagcgtgggcgacagagtgaccatcacctgtagagccagcgagagcgtggacgcttacggcatcagcttcatgaactggttccagcagaagcccggcaaggcccccaagctgctgatctacgccgccagcaatcagggcagcggcgtgccaagcagattttccggctctggcagcggcaccgacttcaccctgaccatcagcagcatgcagcccgaggacttcgccacctactactgccagcagagcaaggacgtgccctggacctttggccagggtaccaagctggaaatcaag

SEQ ID NO: 1154 - DNA, 474 bp, Artificial Sequence
  chemically synthesized
caggggcaatctggccaggggacgtcttactgcagtattgagcattacccctgcaatacacatcatggaggtggctcgagcggcggctctatctcttccggactgctgtccggcagatccgacaatcacggcggaggatccgatatccagctgacccagagccctagcagcctgtctgccagcgtgggcgacagagtgaccatcacctgtagagccagcgagagcgtggacgcttacggcatcagcttcatgaactggttccagcagaagcccggcaaggcccccaagctgctgatctacgccgccagcaatcagggcagcggcgtgccaagcagattttccggctctggcagcggcaccgacttcaccctgaccatcagcagcatgcagcccgaggacttcgccacctactactgccagcagagcaaggacgtgccctggacctttggccagggtaccaagctggaaatcaag

SEQ ID NO: 1155 - protein, 163 aa, Artificial Sequence
  chemically synthesized
QGQSGQGTSYCSIEHYPCNTHHGGGSSGGSAVGLLAPPGGLSGRSDNHGGGSDIQLTQSPSSLSASVGDRVTITCRASESVDAYGISFMNWFQQKPGKAPKLLIYAASNQGSGVPSRFSGSGSGTDFTLTISSMQPEDFATYYCQQSKDVPWTFGQGTKLEIK

SEQ ID NO: 1156 - protein, 156 aa, Artificial Sequence
  chemically synthesized
TSYCSIEHYPCNTHHGGGSSGGSAVGLLAPPGGLSGRSDNHGGGSDIQLTQSPSSLSASVGDRVTITCRASESVDAYGISFMNWFQQKPGKAPKLLIYAASNQGSGVPSRFSGSGSGTDFTLTISSMQPEDFATYYCQQSKDVPWTFGQGTKLEIK

SEQ ID NO: 1157 - protein, 8 aa, Artificial Sequence
  chemically synthesized
LSGRSGNH

SEQ ID NO: 1158 - protein, 9 aa, Artificial Sequence
  chemically synthesized
SGRSANPRG

SEQ ID NO: 1159 - protein, 162 aa, Artificial Sequence
  chemically synthesized
QGQSGQGTSYCSIEHYPCNTHHGGGSSGGSAVGLLAPPSGRSANPRGGGGSDIQLTQSPSSLSASVGDRVTITCRASESVDAYGISFMNWFQQKPGKAPKLLIYAASNQGSGVPSRFSGSGSGTDFTLTISSMQPEDFATYYCQQSKDVPWTFGQGTKLEIK

SEQ ID NO: 1160 - protein, 155 aa, Artificial Sequence
  chemically synthesized
TSYCSIEHYPCNTHHGGGSSGGSAVGLLAPPSGRSANPRGGGGSDIQLTQSPSSLSASVGDRVTITCRASESVDAYGISFMNWFQQKPGKAPKLLIYAASNQGSGVPSRFSGSGSGTDFTLTISSMQPEDFATYYCQQSKDVPWTFGQGTKLEIK

SEQ ID NO: 1161 - protein, 8 aa, Artificial Sequence
  chemically synthesized
LSGRSDDH

SEQ ID NO: 1162 - protein, 8 aa, Artificial Sequence
  chemically synthesized
LSGRSDIH

SEQ ID NO: 1163 - protein, 158 aa, Artificial Sequence
  chemically synthesized
QGQSGQGTSYCSIEHYPCNTHHGGGSSGGSISSGLLSGRSDYHGGGSDIQLTQSPSSLSASVGDRVTITCRASESVDAYGISFMNWFQQKPGKAPKLLIYAASNQGSGVPSRFSGSGSGTDFTLTISSMQPEDFATYYCQQSKDVPWTFGQGTKLEIK

SEQ ID NO: 1164 - protein, 151 aa, Artificial Sequence
  chemically synthesized
TSYCSIEHYPCNTHHGGGSSGGSISSGLLSGRSDYHGGGSDIQLTQSPSSLSASVGDRVTITCRASESVDAYGISFMNWFQQKPGKAPKLLIYAASNQGSGVPSRFSGSGSGTDFTLTISSMQPEDFATYYCQQSKDVPWTFGQGTKLEIK

SEQ ID NO: 1165 - protein, 8 aa, Artificial Sequence
  chemically synthesized
LSGRSDQH

SEQ ID NO: 1166 - protein, 8 aa, Artificial Sequence
  chemically synthesized
LSGRSDTH

SEQ ID NO: 1167 - protein, 158 aa, Artificial Sequence
  chemically synthesized
QGQSGQGTSYCSIEHYPCNTHHGGGSSGGSISSGLLSGRSDNIGGGSDIQLTQSPSSLSASVGDRVTITCRASESVDAYGISFMNWFQQKPGKAPKLLIYAASNQGSGVPSRFSGSGSGTDFTLTISSMQPEDFATYYCQQSKDVPWTFGQGTKLEIK

SEQ ID NO: 1168 - protein, 151 aa, Artificial Sequence
  chemically synthesized
TSYCSIEHYPCNTHHGGGSSGGSISSGLLSGRSDNIGGGSDIQLTQSPSSLSASVGDRVTITCRASESVDAYGISFMNWFQQKPGKAPKLLIYAASNQGSGVPSRFSGSGSGTDFTLTISSMQPEDFATYYCQQSKDVPWTFGQGTKLEIK

SEQ ID NO: 1169 - protein, 8 aa, Artificial Sequence
  chemically synthesized
LSGRSDYH

SEQ ID NO: 1170 - protein, 152 aa, Artificial Sequence
  chemically synthesized
TSYCSIEHYPCNTHHGGGSSGGSISSGLLSGRSANPRGGGSDIQLTQSPSSLSASVGDRVTITCRASESVDAYGISFMNWFQQKPGKAPKLLIYAASNQGSGVPSRFSGSGSGTDFTLTISSMQPEDFATYYCQQSKDVPWTFGQGTKLEIK

SEQ ID NO: 1171 - protein, 159 aa, Artificial Sequence
  chemically synthesized
QGQSGQGTSYCSIEHYPCNTHHGGGSSGGSISSGLLSGRSANPRGGGSDIQLTQSPSSLSASVGDRVTITCRASESVDAYGISFMNWFQQKPGKAPKLLIYAASNQGSGVPSRFSGSGSGTDFTLTISSMQPEDFATYYCQQSKDVPWTFGQGTKLEIK

SEQ ID NO: 1172 - DNA, 456 bp, Artificial Sequence
  chemically synthesized
acgtcttactgcagtattgagcattacccctgcaatacacatcatggaggtggctcgagcggcggctctatctcttccggactgctgtccggcagatccgccaatcctcgtggcggaggatccgatatccagctgacccagagccctagcagcctgtctgccagcgtgggcgacagagtgaccatcacctgtagagccagcgagagcgtggacgcttacggcatcagcttcatgaactggttccagcagaagcccggcaaggcccccaagctgctgatctacgccgccagcaatcagggcagcggcgtgccaagcagattttccggctctggcagcggcaccgacttcaccctgaccatcagcagcatgcagcccgaggacttcgccacctactactgccagcagagcaaggacgtgccctggacctttggccagggtaccaagctggaaatcaag

SEQ ID NO: 1173 - DNA, 477 bp, Artificial Sequence
  chemically synthesized
caggggcaatctggccaggggacgtcttactgcagtattgagcattacccctgcaatacacatcatggaggtggctcgagcggcggctctatctcttccggactgctgtccggcagatccgccaatcctcgtggcggaggatccgatatccagctgacccagagccctagcagcctgtctgccagcgtgggcgacagagtgaccatcacctgtagagccagcgagagcgtggacgcttacggcatcagcttcatgaactggttccagcagaagcccggcaaggcccccaagctgctgatctacgccgccagcaatcagggcagcggcgtgccaagcagattttccggctctggcagcggcaccgacttcaccctgaccatcagcagcatgcagcccgaggacttcgccacctactactgccagcagagcaaggacgtgccctggacctttggccagggtaccaagctggaaatcaag

SEQ ID NO: 1174 - protein, 151 aa, Artificial Sequence
  chemically synthesized
TSYCSIEHYPCNTHHGGGSSGGSISSGLLSGRSDDHGGGSDIQLTQSPSSLSASVGDRVTITCRASESVDAYGISFMNWFQQKPGKAPKLLIYAASNQGSGVPSRFSGSGSGTDFTLTISSMQPEDFATYYCQQSKDVPWTFGQGTKLEIK

SEQ ID NO: 1175 - protein, 158 aa, Artificial Sequence
  chemically synthesized
QGQSGQGTSYCSIEHYPCNTHHGGGSSGGSISSGLLSGRSDDHGGGSDIQLTQSPSSLSASVGDRVTITCRASESVDAYGISFMNWFQQKPGKAPKLLIYAASNQGSGVPSRFSGSGSGTDFTLTISSMQPEDFATYYCQQSKDVPWTFGQGTKLEIK

SEQ ID NO: 1176 - DNA, 453 bp, Artificial Sequence
  chemically synthesized
acgtcttactgcagtattgagcattacccctgcaatacacatcatggaggtggctcgagcggcggctctatctcttccggactgctgtccggcagatccgacgatcacggcggaggatccgatatccagctgacccagagccctagcagcctgtctgccagcgtgggcgacagagtgaccatcacctgtagagccagcgagagcgtggacgcttacggcatcagcttcatgaactggttccagcagaagcccggcaaggcccccaagctgctgatctacgccgccagcaatcagggcagcggcgtgccaagcagattttccggctctggcagcggcaccgacttcaccctgaccatcagcagcatgcagcccgaggacttcgccacctactactgccagcagagcaaggacgtgccctggacctttggccagggtaccaagctggaaatcaag

SEQ ID NO: 1177 - DNA, 474 bp, Artificial Sequence
  chemically synthesized
caggggcaatctggccaggggacgtcttactgcagtattgagcattacccctgcaatacacatcatggaggtggctcgagcggcggctctatctcttccggactgctgtccggcagatccgacgatcacggcggaggatccgatatccagctgacccagagccctagcagcctgtctgccagcgtgggcgacagagtgaccatcacctgtagagccagcgagagcgtggacgcttacggcatcagcttcatgaactggttccagcagaagcccggcaaggcccccaagctgctgatctacgccgccagcaatcagggcagcggcgtgccaagcagattttccggctctggcagcggcaccgacttcaccctgaccatcagcagcatgcagcccgaggacttcgccacctactactgccagcagagcaaggacgtgccctggacctttggccagggtaccaagctggaaatcaag

SEQ ID NO: 1178 - protein, 151 aa, Artificial Sequence
  chemically synthesized
TSYCSIEHYPCNTHHGGGSSGGSISSGLLSGRSDIHGGGSDIQLTQSPSSLSASVGDRVTITCRASESVDAYGISFMNWFQQKPGKAPKLLIYAASNQGSGVPSRFSGSGSGTDFTLTISSMQPEDFATYYCQQSKDVPWTFGQGTKLEIK

SEQ ID NO: 1179 - protein, 158 aa, Artificial Sequence
  chemically synthesized
QGQSGQGTSYCSIEHYPCNTHHGGGSSGGSISSGLLSGRSDIHGGGSDIQLTQSPSSLSASVGDRVTITCRASESVDAYGISFMNWFQQKPGKAPKLLIYAASNQGSGVPSRFSGSGSGTDFTLTISSMQPEDFATYYCQQSKDVPWTFGQGTKLEIK

SEQ ID NO: 1180 - DNA, 453 bp, Artificial Sequence
  chemically synthesized
acgtcttactgcagtattgagcattacccctgcaatacacatcatggaggtggctcgagcggcggctctatctcttccggactgctgtccggcagatccgacattcacggcggaggatccgatatccagctgacccagagccctagcagcctgtctgccagcgtgggcgacagagtgaccatcacctgtagagccagcgagagcgtggacgcttacggcatcagcttcatgaactggttccagcagaagcccggcaaggcccccaagctgctgatctacgccgccagcaatcagggcagcggcgtgccaagcagattttccggctctggcagcggcaccgacttcaccctgaccatcagcagcatgcagcccgaggacttcgccacctactactgccagcagagcaaggacgtgccctggacctttggccagggtaccaagctggaaatcaag

SEQ ID NO: 1181 - DNA, 474 bp, Artificial Sequence
  chemically synthesized
caggggcaatctggccaggggacgtcttactgcagtattgagcattacccctgcaatacacatcatggaggtggctcgagcggcggctctatctcttccggactgctgtccggcagatccgacattcacggcggaggatccgatatccagctgacccagagccctagcagcctgtctgccagcgtgggcgacagagtgaccatcacctgtagagccagcgagagcgtggacgcttacggcatcagcttcatgaactggttccagcagaagcccggcaaggcccccaagctgctgatctacgccgccagcaatcagggcagcggcgtgccaagcagattttccggctctggcagcggcaccgacttcaccctgaccatcagcagcatgcagcccgaggacttcgccacctactactgccagcagagcaaggacgtgccctggacctttggccagggtaccaagctggaaatcaag

SEQ ID NO: 1182 - protein, 151 aa, Artificial Sequence
  chemically synthesized
TSYCSIEHYPCNTHHGGGSSGGSISSGLLSGRSDTHGGGSDIQLTQSPSSLSASVGDRVTITCRASESVDAYGISFMNWFQQKPGKAPKLLIYAASNQGSGVPSRFSGSGSGTDFTLTISSMQPEDFATYYCQQSKDVPWTFGQGTKLEIK

SEQ ID NO: 1183 - protein, 158 aa, Artificial Sequence
  chemically synthesized
QGQSGQGTSYCSIEHYPCNTHHGGGSSGGSISSGLLSGRSDTHGGGSDIQLTQSPSSLSASVGDRVTITCRASESVDAYGISFMNWFQQKPGKAPKLLIYAASNQGSGVPSRFSGSGSGTDFTLTISSMQPEDFATYYCQQSKDVPWTFGQGTKLEIK

SEQ ID NO: 1184 - DNA, 453 bp, Artificial Sequence
  chemically synthesized
acgtcttactgcagtattgagcattacccctgcaatacacatcatggaggtggctcgagcggcggctctatctcttccggactgctgtccggcagatccgacactcacggcggaggatccgatatccagctgacccagagccctagcagcctgtctgccagcgtgggcgacagagtgaccatcacctgtagagccagcgagagcgtggacgcttacggcatcagcttcatgaactggttccagcagaagcccggcaaggcccccaagctgctgatctacgccgccagcaatcagggcagcggcgtgccaagcagattttccggctctggcagcggcaccgacttcaccctgaccatcagcagcatgcagcccgaggacttcgccacctactactgccagcagagcaaggacgtgccctggacctttggccagggtaccaagctggaaatcaag

SEQ ID NO: 1185 - DNA, 474 bp, Artificial Sequence
  chemically synthesized
caggggcaatctggccaggggacgtcttactgcagtattgagcattacccctgcaatacacatcatggaggtggctcgagcggcggctctatctcttccggactgctgtccggcagatccgacactcacggcggaggatccgatatccagctgacccagagccctagcagcctgtctgccagcgtgggcgacagagtgaccatcacctgtagagccagcgagagcgtggacgcttacggcatcagcttcatgaactggttccagcagaagcccggcaaggcccccaagctgctgatctacgccgccagcaatcagggcagcggcgtgccaagcagattttccggctctggcagcggcaccgacttcaccctgaccatcagcagcatgcagcccgaggacttcgccacctactactgccagcagagcaaggacgtgccctggacctttggccagggtaccaagctggaaatcaag

SEQ ID NO: 1186 - protein, 151 aa, Artificial Sequence
  chemically synthesized
TSYCSIEHYPCNTHHGGGSSGGSISSGLLSGRSDQHGGGSDIQLTQSPSSLSASVGDRVTITCRASESVDAYGISFMNWFQQKPGKAPKLLIYAASNQGSGVPSRFSGSGSGTDFTLTISSMQPEDFATYYCQQSKDVPWTFGQGTKLEIK

SEQ ID NO: 1187 - protein, 158 aa, Artificial Sequence
  chemically synthesized
QGQSGQGTSYCSIEHYPCNTHHGGGSSGGSISSGLLSGRSDQHGGGSDIQLTQSPSSLSASVGDRVTITCRASESVDAYGISFMNWFQQKPGKAPKLLIYAASNQGSGVPSRFSGSGSGTDFTLTISSMQPEDFATYYCQQSKDVPWTFGQGTKLEIK

SEQ ID NO: 1188 - DNA, 453 bp, Artificial Sequence
  chemically synthesized
acgtcttactgcagtattgagcattacccctgcaatacacatcatggaggtggctcgagcggcggctctatctcttccggactgctgtccggcagatccgaccagcacggcggaggatccgatatccagctgacccagagccctagcagcctgtctgccagcgtgggcgacagagtgaccatcacctgtagagccagcgagagcgtggacgcttacggcatcagcttcatgaactggttccagcagaagcccggcaaggcccccaagctgctgatctacgccgccagcaatcagggcagcggcgtgccaagcagattttccggctctggcagcggcaccgacttcaccctgaccatcagcagcatgcagcccgaggacttcgccacctactactgccagcagagcaaggacgtgccctggacctttggccagggtaccaagctggaaatcaag

SEQ ID NO: 1189 - DNA, 474 bp, Artificial Sequence
  chemically synthesized
caggggcaatctggccaggggacgtcttactgcagtattgagcattacccctgcaatacacatcatggaggtggctcgagcggcggctctatctcttccggactgctgtccggcagatccgaccagcacggcggaggatccgatatccagctgacccagagccctagcagcctgtctgccagcgtgggcgacagagtgaccatcacctgtagagccagcgagagcgtggacgcttacggcatcagcttcatgaactggttccagcagaagcccggcaaggcccccaagctgctgatctacgccgccagcaatcagggcagcggcgtgccaagcagattttccggctctggcagcggcaccgacttcaccctgaccatcagcagcatgcagcccgaggacttcgccacctactactgccagcagagcaaggacgtgccctggacctttggccagggtaccaagctggaaatcaag

SEQ ID NO: 1190 - protein, 151 aa, Artificial Sequence
  chemically synthesized
TSYCSIEHYPCNTHHGGGSSGGSISSGLLSGRSANPGGGSDIQLTQSPSSLSASVGDRVTITCRASESVDAYGISFMNWFQQKPGKAPKLLIYAASNQGSGVPSRFSGSGSGTDFTLTISSMQPEDFATYYCQQSKDVPWTFGQGTKLEIK

SEQ ID NO: 1191 - protein, 158 aa, Artificial Sequence
  chemically synthesized
QGQSGQGTSYCSIEHYPCNTHHGGGSSGGSISSGLLSGRSANPGGGSDIQLTQSPSSLSASVGDRVTITCRASESVDAYGISFMNWFQQKPGKAPKLLIYAASNQGSGVPSRFSGSGSGTDFTLTISSMQPEDFATYYCQQSKDVPWTFGQGTKLEIK

SEQ ID NO: 1192 - DNA, 453 bp, Artificial Sequence
  chemically synthesized
acgtcttactgcagtattgagcattacccctgcaatacacatcatggaggtggctcgagcggcggctctatctcttccggactgctgtccggcagatccgctaatcccggcggaggatccgatatccagctgacccagagccctagcagcctgtctgccagcgtgggcgacagagtgaccatcacctgtagagccagcgagagcgtggacgcttacggcatcagcttcatgaactggttccagcagaagcccggcaaggcccccaagctgctgatctacgccgccagcaatcagggcagcggcgtgccaagcagattttccggctctggcagcggcaccgacttcaccctgaccatcagcagcatgcagcccgaggacttcgccacctactactgccagcagagcaaggacgtgccctggacctttggccagggtaccaagctggaaatcaag

SEQ ID NO: 1193 - DNA, 474 bp, Artificial Sequence
  chemically synthesized
caggggcaatctggccaggggacgtcttactgcagtattgagcattacccctgcaatacacatcatggaggtggctcgagcggcggctctatctcttccggactgctgtccggcagatccgctaatcccggcggaggatccgatatccagctgacccagagccctagcagcctgtctgccagcgtgggcgacagagtgaccatcacctgtagagccagcgagagcgtggacgcttacggcatcagcttcatgaactggttccagcagaagcccggcaaggcccccaagctgctgatctacgccgccagcaatcagggcagcggcgtgccaagcagattttccggctctggcagcggcaccgacttcaccctgaccatcagcagcatgcagcccgaggacttcgccacctactactgccagcagagcaaggacgtgccctggacctttggccagggtaccaagctggaaatcaag

SEQ ID NO: 1194 - protein, 151 aa, Artificial Sequence
  chemically synthesized
TSYCSIEHYPCNTHHGGGSSGGSISSGLLSGRSANIGGGSDIQLTQSPSSLSASVGDRVTITCRASESVDAYGISFMNWFQQKPGKAPKLLIYAASNQGSGVPSRFSGSGSGTDFTLTISSMQPEDFATYYCQQSKDVPWTFGQGTKLEIK

SEQ ID NO: 1195 - protein, 158 aa, Artificial Sequence
  chemically synthesized
QGQSGQGTSYCSIEHYPCNTHHGGGSSGGSISSGLLSGRSANIGGGSDIQLTQSPSSLSASVGDRVTITCRASESVDAYGISFMNWFQQKPGKAPKLLIYAASNQGSGVPSRFSGSGSGTDFTLTISSMQPEDFATYYCQQSKDVPWTFGQGTKLEIK

SEQ ID NO: 1196 - DNA, 453 bp, Artificial Sequence
  chemically synthesized
acgtcttactgcagtattgagcattacccctgcaatacacatcatggaggtggctcgagcggcggctctatctcttccggactgctgtccggcagatccgctaatattggcggaggatccgatatccagctgacccagagccctagcagcctgtctgccagcgtgggcgacagagtgaccatcacctgtagagccagcgagagcgtggacgcttacggcatcagcttcatgaactggttccagcagaagcccggcaaggcccccaagctgctgatctacgccgccagcaatcagggcagcggcgtgccaagcagattttccggctctggcagcggcaccgacttcaccctgaccatcagcagcatgcagcccgaggacttcgccacctactactgccagcagagcaaggacgtgccctggacctttggccagggtaccaagctggaaatcaag

SEQ ID NO: 1197 - DNA, 474 bp, Artificial Sequence
  chemically synthesized
caggggcaatctggccaggggacgtcttactgcagtattgagcattacccctgcaatacacatcatggaggtggctcgagcggcggctctatctcttccggactgctgtccggcagatccgctaatattggcggaggatccgatatccagctgacccagagccctagcagcctgtctgccagcgtgggcgacagagtgaccatcacctgtagagccagcgagagcgtggacgcttacggcatcagcttcatgaactggttccagcagaagcccggcaaggcccccaagctgctgatctacgccgccagcaatcagggcagcggcgtgccaagcagattttccggctctggcagcggcaccgacttcaccctgaccatcagcagcatgcagcccgaggacttcgccacctactactgccagcagagcaaggacgtgccctggacctttggccagggtaccaagctggaaatcaag

SEQ ID NO: 1198 - protein, 151 aa, Artificial Sequence
  chemically synthesized
TSYCSIEHYPCNTHHGGGSSGGSISSGLLSGRSDNPGGGSDIQLTQSPSSLSASVGDRVTITCRASESVDAYGISFMNWFQQKPGKAPKLLIYAASNQGSGVPSRFSGSGSGTDFTLTISSMQPEDFATYYCQQSKDVPWTFGQGTKLEIK

SEQ ID NO: 1199 - protein, 158 aa, Artificial Sequence
  chemically synthesized
QGQSGQGTSYCSIEHYPCNTHHGGGSSGGSISSGLLSGRSDNPGGGSDIQLTQSPSSLSASVGDRVTITCRASESVDAYGISFMNWFQQKPGKAPKLLIYAASNQGSGVPSRFSGSGSGTDFTLTISSMQPEDFATYYCQQSKDVPWTFGQGTKLEIK

SEQ ID NO: 1200 - DNA, 453 bp, Artificial Sequence
  chemically synthesized
acgtcttactgcagtattgagcattacccctgcaatacacatcatggaggtggctcgagcggcggctctatctcttccggactgctgtccggcagatccgacaatcccggcggaggatccgatatccagctgacccagagccctagcagcctgtctgccagcgtgggcgacagagtgaccatcacctgtagagccagcgagagcgtggacgcttacggcatcagcttcatgaactggttccagcagaagcccggcaaggcccccaagctgctgatctacgccgccagcaatcagggcagcggcgtgccaagcagattttccggctctggcagcggcaccgacttcaccctgaccatcagcagcatgcagcccgaggacttcgccacctactactgccagcagagcaaggacgtgccctggacctttggccagggtaccaagctggaaatcaag

SEQ ID NO: 1201 - DNA, 474 bp, Artificial Sequence
  chemically synthesized
caggggcaatctggccaggggacgtcttactgcagtattgagcattacccctgcaatacacatcatggaggtggctcgagcggcggctctatctcttccggactgctgtccggcagatccgacaatcccggcggaggatccgatatccagctgacccagagccctagcagcctgtctgccagcgtgggcgacagagtgaccatcacctgtagagccagcgagagcgtggacgcttacggcatcagcttcatgaactggttccagcagaagcccggcaaggcccccaagctgctgatctacgccgccagcaatcagggcagcggcgtgccaagcagattttccggctctggcagcggcaccgacttcaccctgaccatcagcagcatgcagcccgaggacttcgccacctactactgccagcagagcaaggacgtgccctggacctttggccagggtaccaagctggaaatcaag

SEQ ID NO: 1202 - protein, 152 aa, Artificial Sequence
  chemically synthesized
APRCYMFASYCKSQYGGGSSGGSISSGLLSGRSANPRGGGSDIQLTQSPSSLSASVGDRVTITCRASESVDAYGISFMNWFQQKPGKAPKLLIYAASNQGSGVPSRFSGSGSGTDFTLTISSMQPEDFATYYCQQSKDVPWTFGQGTKLEIK

SEQ ID NO: 1203 - protein, 159 aa, Artificial Sequence
  chemically synthesized
QGQSGQGAPRCYMFASYCKSQYGGGSSGGSISSGLLSGRSANPRGGGSDIQLTQSPSSLSASVGDRVTITCRASESVDAYGISFMNWFQQKPGKAPKLLIYAASNQGSGVPSRFSGSGSGTDFTLTISSMQPEDFATYYCQQSKDVPWTFGQGTKLEIK

SEQ ID NO: 1204 - DNA, 456 bp, Artificial Sequence
  chemically synthesized
gcgcctaggtgctatatgtttgcgtcgtattgcaagagtcagtatggaggtggctcgagcggcggctctatctcttccggactgctgtccggcagatccgccaatcctcgtggcggaggatccgatatccagctgacccagagccctagcagcctgtctgccagcgtgggcgacagagtgaccatcacctgtagagccagcgagagcgtggacgcttacggcatcagcttcatgaactggttccagcagaagcccggcaaggcccccaagctgctgatctacgccgccagcaatcagggcagcggcgtgccaagcagattttccggctctggcagcggcaccgacttcaccctgaccatcagcagcatgcagcccgaggacttcgccacctactactgccagcagagcaaggacgtgccctggacctttggccagggtaccaagctggaaatcaag

SEQ ID NO: 1205 - DNA, 477 bp, Artificial Sequence
  chemically synthesized
caaggccagtctggccaaggtgcgcctaggtgctatatgtttgcgtcgtattgcaagagtcagtatggaggtggctcgagcggcggctctatctcttccggactgctgtccggcagatccgccaatcctcgtggcggaggatccgatatccagctgacccagagccctagcagcctgtctgccagcgtgggcgacagagtgaccatcacctgtagagccagcgagagcgtggacgcttacggcatcagcttcatgaactggttccagcagaagcccggcaaggcccccaagctgctgatctacgccgccagcaatcagggcagcggcgtgccaagcagattttccggctctggcagcggcaccgacttcaccctgaccatcagcagcatgcagcccgaggacttcgccacctactactgccagcagagcaaggacgtgccctggacctttggccagggtaccaagctggaaatcaag

SEQ ID NO: 1206 - protein, 15 aa, Artificial Sequence
  chemically synthesized
RYCHAANPDRFCGIY

SEQ ID NO: 1207 - protein, 15 aa, Artificial Sequence
  chemically synthesized
PRVCSTDGGDYCLLP

SEQ ID NO: 1208 - protein, 15 aa, Artificial Sequence
  chemically synthesized
PRPQCHHRHNCPDHP

SEQ ID NO: 1209 - protein, 15 aa, Artificial Sequence
  chemically synthesized
KCSRPAHQNPDRCSR

SEQ ID NO: 1210 - protein, 15 aa, Artificial Sequence
  chemically synthesized
ASYRCPDYKCSHTKH

SEQ ID NO: 1211 - protein, 15 aa, Artificial Sequence
  chemically synthesized
LPRCPDHPIKCIETK

SEQ ID NO: 1212 - protein, 15 aa, Artificial Sequence
  chemically synthesized
YTFGCPDRYCDRAAT

SEQ ID NO: 1213 - protein, 15 aa, Artificial Sequence
  chemically synthesized
RGCPDFNPPSHCYTA

SEQ ID NO: 1214 - protein, 15 aa, Artificial Sequence
  chemically synthesized
RDYCGPQSPDYCHEI

SEQ ID NO: 1215 - protein, 15 aa, Artificial Sequence
  chemically synthesized
PNKPCPDLQCYVTNY

SEQ ID NO: 1216 - protein, 15 aa, Artificial Sequence
  chemically synthesized
PRVACGEPDLCYSNT

SEQ ID NO: 1217 - protein, 15 aa, Artificial Sequence
  chemically synthesized
RGCKKHTISTLTCPD

SEQ ID NO: 1218 - protein, 15 aa, Artificial Sequence
  chemically synthesized
PAYRCPDRPPCKNQM

SEQ ID NO: 1219 - skipped

SEQ ID NO: 1220 - protein, 15 aa, Artificial Sequence
  chemically synthesized
NARCYPYFGDNCHMN

SEQ ID NO: 1221 - protein, 15 aa, Artificial Sequence
  chemically synthesized
PTLRCPDRWCYDSPR

SEQ ID NO: 1222 - protein, 15 aa, Artificial Sequence
  chemically synthesized
PSNLCPDKWCQTWRS

SEQ ID NO: 1223 - protein, 15 aa, Artificial Sequence
  chemically synthesized
TPRYCAASYCPAHGY

SEQ ID NO: 1224 - protein, 15 aa, Artificial Sequence
  chemically synthesized
RPGCGAVSPRCPDAP

SEQ ID NO: 1225 - protein, 15 aa, Artificial Sequence
  chemically synthesized
VLRCHKQNPDNCNNH

SEQ ID NO: 1226 - protein, 15 aa, Artificial Sequence
  chemically synthesized
GVKSCREPDFCSRGS

SEQ ID NO: 1227 - protein, 15 aa, Artificial Sequence
  chemically synthesized
RNNLCPDYSCNNHNS

SEQ ID NO: 1228 - protein, 15 aa, Artificial Sequence
  chemically synthesized
RAACHRLNPDACTNG

SEQ ID NO: 1229 - protein, 15 aa, Artificial Sequence
  chemically synthesized
VCQSDRIPDYVTCTD

SEQ ID NO: 1230 - protein, 15 aa, Artificial Sequence
  chemically synthesized
RNCRIASINPDYCNI

SEQ ID NO: 1231 - protein, 15 aa, Artificial Sequence
  chemically synthesized
KEWRCPDYKCKPSYH

SEQ ID NO: 1232 - protein, 15 aa, Artificial Sequence
  chemically synthesized
NLRICHKSLCPDYIK

SEQ ID NO: 1233 - protein, 15 aa, Artificial Sequence
  chemically synthesized
NTHKCSNTNICPSFN

SEQ ID NO: 1234 - protein, 15 aa, Artificial Sequence
  chemically synthesized
STRYCQASQCQMSPY

SEQ ID NO: 1235 - protein, 15 aa, Artificial Sequence
  chemically synthesized
THRFCTASLCNKNTS

SEQ ID NO: 1236 - protein, 15 aa, Artificial Sequence
  chemically synthesized
YTLCNTRSPDWCPNK

SEQ ID NO: 1237 - protein, 15 aa, Artificial Sequence
  chemically synthesized
IRCTTGQSPDYCPQS

SEQ ID NO: 1238 - protein, 15 aa, Artificial Sequence
  chemically synthesized
RCNQPDKNDQMLCNI

SEQ ID NO: 1239 - protein, 15 aa, Artificial Sequence
  chemically synthesized
GTCRTDHQSPDYCYY

SEQ ID NO: 1240 - protein, 15 aa, Artificial Sequence
  chemically synthesized
RGCFRSGDSLGMCPD

SEQ ID NO: 1241 - protein, 15 aa, Artificial Sequence
  chemically synthesized
SGCFDSNEHRHCSRI

SEQ ID NO: 1242 - protein, 15 aa, Artificial Sequence
  chemically synthesized
NRCMKLWYNPDCVAR

SEQ ID NO: 1243 - protein, 15 aa, Artificial Sequence
  chemically synthesized
PLCARPHYWSPCDQS

SEQ ID NO: 1244 - protein, 15 aa, Artificial Sequence
  chemically synthesized
DSKCHPNSPDYCFNS

SEQ ID NO: 1245 - protein, 15 aa, Artificial Sequence
  chemically synthesized
NGSCRPLGGDFCGNR

SEQ ID NO: 1246 - protein, 15 aa, Artificial Sequence
  chemically synthesized
KTRCIEMSGDYCAKS

SEQ ID NO: 1247 - protein, 15 aa, Artificial Sequence
  chemically synthesized
IRPCMYNWGDLCNQF

SEQ ID NO: 1248 - protein, 15 aa, Artificial Sequence
  chemically synthesized
VKTCMENNPDYCYNN

SEQ ID NO: 1249 - protein, 15 aa, Artificial Sequence
  chemically synthesized
LRMCFEASGDYCDQQ

SEQ ID NO: 1250 - protein, 15 aa, Artificial Sequence
  chemically synthesized
IRKCQLDGPDQCMLT

SEQ ID NO: 1251 - protein, 15 aa, Artificial Sequence
  chemically synthesized
KWKCHKNNPNYCNNR

SEQ ID NO: 1252 - protein, 15 aa, Artificial Sequence
  chemically synthesized
RTMCLDTNPDYCQSH

SEQ ID NO: 1253 - protein, 15 aa, Artificial Sequence
  chemically synthesized
LAACHSMDSHRCPDY

SEQ ID NO: 1254 - protein, 15 aa, Artificial Sequence
  chemically synthesized
RSPCIHNATMCPDYT

SEQ ID NO: 1255 - protein, 15 aa, Artificial Sequence
  chemically synthesized
MPRCPDWPPRCSMVI

SEQ ID NO: 1256 - protein, 15 aa, Artificial Sequence
  chemically synthesized
VRQLCRLPDYCPSGK

SEQ ID NO: 1257 - protein, 15 aa, Artificial Sequence
  chemically synthesized
PRPPCAQSLNCPDRA

SEQ ID NO: 1258 - protein, 15 aa, Artificial Sequence
  chemically synthesized
SFGRCTLVRTCPDFM

SEQ ID NO: 1259 - protein, 15 aa, Artificial Sequence
  chemically synthesized
RDKPCPDFSCATIHY

SEQ ID NO: 1260 - protein, 15 aa, Artificial Sequence
  chemically synthesized
ATKPCPDRWCTMSTL

SEQ ID NO: 1261 - protein, 15 aa, Artificial Sequence
  chemically synthesized
SSNRCPDLRCTHHNM

SEQ ID NO: 1262 - protein, 15 aa, Artificial Sequence
  chemically synthesized
RGSMCPDLHCSLSHI

SEQ ID NO: 1263 - protein, 15 aa, Artificial Sequence
  chemically synthesized
NYQRCPDRTCMHNII

SEQ ID NO: 1264 - protein, 15 aa, Artificial Sequence
  chemically synthesized
QKRPCPDRKCHAHYN

SEQ ID NO: 1265 - protein, 15 aa, Artificial Sequence
  chemically synthesized
QNHRCPDRWCNKTTN

SEQ ID NO: 1266 - protein, 15 aa, Artificial Sequence
  chemically synthesized
RLNLCPDKHCHMTNL

SEQ ID NO: 1267 - protein, 15 aa, Artificial Sequence
  chemically synthesized
PQDRCPDKRCTNPGN

SEQ ID NO: 1268 - protein, 15 aa, Artificial Sequence
  chemically synthesized
SRWRCPDYKCEHGKY

SEQ ID NO: 1269 - protein, 15 aa, Artificial Sequence
  chemically synthesized
YENQCPDLYCNRYSM

SEQ ID NO: 1270 - protein, 15 aa, Artificial Sequence
  chemically synthesized
TARSCPVFNCPDNNS

SEQ ID NO: 1271 - protein, 15 aa, Artificial Sequence
  chemically synthesized
MDQRCPDAWCTSKPK

SEQ ID NO: 1272 - protein, 15 aa, Artificial Sequence
  chemically synthesized
GDLRCPDRLCPRHSL

SEQ ID NO: 1273 - protein, 15 aa, Artificial Sequence
  chemically synthesized
IQYLCPDYHCKASNN

SEQ ID NO: 1274 - protein, 15 aa, Artificial Sequence
  chemically synthesized
QHHRCPDRYCNSNNN

SEQ ID NO: 1275 - protein, 15 aa, Artificial Sequence
  chemically synthesized
TVALCPDYSCYHINN

SEQ ID NO: 1276 - protein, 15 aa, Artificial Sequence
  chemically synthesized
SPWRCPDRYCLSNHD

SEQ ID NO: 1277 - protein, 15 aa, Artificial Sequence
  chemically synthesized
SSKRCPDRFCNKTHA

SEQ ID NO: 1278 - protein, 15 aa, Artificial Sequence
  chemically synthesized
HTDRCPDYKCSQNHF

SEQ ID NO: 1279 - protein, 15 aa, Artificial Sequence
  chemically synthesized
SRSNCTPQRCNSDYH

SEQ ID NO: 1280 - protein, 15 aa, Artificial Sequence
  chemically synthesized
FAARCPDKYCAIHTN

SEQ ID NO: 1281 - protein, 15 aa, Artificial Sequence
  chemically synthesized
GSARCPDLVCQQTKQ

SEQ ID NO: 1282 - protein, 15 aa, Artificial Sequence
  chemically synthesized
RNLMCPDKFCNKNTK

SEQ ID NO: 1283 - protein, 15 aa, Artificial Sequence
  chemically synthesized
NIRLCPDKVCTPTWV

SEQ ID NO: 1284 - protein, 15 aa, Artificial Sequence
  chemically synthesized
MTDLCPDAHCAKTHM

SEQ ID NO: 1285 - protein, 15 aa, Artificial Sequence
  chemically synthesized
PYSRLCAYPCPDFVG

SEQ ID NO: 1286 - protein, 15 aa, Artificial Sequence
  chemically synthesized
LCGCARSPDYCKCRG

SEQ ID NO: 1287 - protein, 15 aa, Artificial Sequence
  chemically synthesized
WGRCERVPDCCCPRG

SEQ ID NO: 1288 - protein, 15 aa, Artificial Sequence
  chemically synthesized
TRNTCHTRICYGMAC

SEQ ID NO: 1289 - protein, 15 aa, Artificial Sequence
  chemically synthesized
CVCTSCSSYWTLCPD

SEQ ID NO: 1290 - protein, 15 aa, Artificial Sequence
  chemically synthesized
LCCSRGSNCPDRCTW

SEQ ID NO: 1291 - protein, 15 aa, Artificial Sequence
  chemically synthesized
CCPLCQANMCPDNQS

SEQ ID NO: 1292 - protein, 15 aa, Artificial Sequence
  chemically synthesized
ECKLCCPDLYCGGTM

SEQ ID NO: 1293 - protein, 15 aa, Artificial Sequence
  chemically synthesized
CSNPMCAYCCPDLIL

SEQ ID NO: 1294 - protein, 15 aa, Artificial Sequence
  chemically synthesized
CPRCNTYSKHDCYHQ

SEQ ID NO: 1295 - protein, 15 aa, Artificial Sequence
  chemically synthesized
FCCASKMPAPSNCHT

SEQ ID NO: 1296 - protein, 146 aa, Artificial Sequence
  chemically synthesized
RYCHAANPDRFCGIYGGGSSGGSISSGLLSGRSDNHGGSEIVLTQSPATLSLSPGERATLSCRASQSVSSYLAWYQQKPGQAPRLLIYDASNRATGIPARFSGSGSGTDFTLTISSLEPEDFAVYYCQQSSNWPRTFGQGTKVEIK

SEQ ID NO: 1297 - protein, 153 aa, Artificial Sequence
  chemically synthesized
QGQSGQGRYCHAANPDRFCGIYGGGSSGGSISSGLLSGRSDNHGGSEIVLTQSPATLSLSPGERATLSCRASQSVSSYLAWYQQKPGQAPRLLIYDASNRATGIPARFSGSGSGTDFTLTISSLEPEDFAVYYCQQSSNWPRTFGQGTKVEIK

SEQ ID NO: 1298 - DNA, 438 bp, Artificial Sequence
  chemically synthesized
cggtattgccatgctgcgaatcctgatcggttttgcggtatttatggaggtggctcgagcggcggctctatctcttccggactgctgtccggcagatccgacaatcacggcggatccgagatcgtgctgacacagagccctgccaccctgtctctgagccctggcgaaagagccaccctgagctgtagagccagccagagcgtgtccagctacctggcctggtatcagcagaagcccggccaggctccccggctgctgatctacgatgccagcaatagagccaccggcatccccgccagattttccggctctggcagcggcaccgacttcaccctgaccatcagctccctggaacccgaggacttcgccgtgtactactgccagcagagcagcaactggccccggacatttggccagggcaccaaggtggaaatcaag

SEQ ID NO: 1299 - DNA, 459 bp, Artificial Sequence
  chemically synthesized
caaggccagtctggccaaggtcggtattgccatgctgcgaatcctgatcggttttgcggtatttatggaggtggctcgagcggcggctctatctcttccggactgctgtccggcagatccgacaatcacggcggatccgagatcgtgctgacacagagccctgccaccctgtctctgagccctggcgaaagagccaccctgagctgtagagccagccagagcgtgtccagctacctggcctggtatcagcagaagcccggccaggctccccggctgctgatctacgatgccagcaatagagccaccggcatccccgccagattttccggctctggcagcggcaccgacttcaccctgaccatcagctccctggaacccgaggacttcgccgtgtactactgccagcagagcagcaactggccccggacatttggccagggcaccaaggtggaaatcaag

SEQ ID NO: 1300 - protein, 146 aa, Artificial Sequence
  chemically synthesized
PRVCSTDGGDYCLLPGGGSSGGSISSGLLSGRSDNHGGSEIVLTQSPATLSLSPGERATLSCRASQSVSSYLAWYQQKPGQAPRLLIYDASNRATGIPARFSGSGSGTDFTLTISSLEPEDFAVYYCQQSSNWPRTFGQGTKVEIK

SEQ ID NO: 1301 - protein, 153 aa, Artificial Sequence
  chemically synthesized
QGQSGQGPRVCSTDGGDYCLLPGGGSSGGSISSGLLSGRSDNHGGSEIVLTQSPATLSLSPGERATLSCRASQSVSSYLAWYQQKPGQAPRLLIYDASNRATGIPARFSGSGSGTDFTLTISSLEPEDFAVYYCQQSSNWPRTFGQGTKVEIK

SEQ ID NO: 1302 - DNA, 438 bp, Artificial Sequence
  chemically synthesized
cctagggtttgctctactgatggtggtgattattgcttgcttcctggaggtggctcgagcggcggctctatctcttccggactgctgtccggcagatccgacaatcacggcggatccgagatcgtgctgacacagagccctgccaccctgtctctgagccctggcgaaagagccaccctgagctgtagagccagccagagcgtgtccagctacctggcctggtatcagcagaagcccggccaggctccccggctgctgatctacgatgccagcaatagagccaccggcatccccgccagattttccggctctggcagcggcaccgacttcaccctgaccatcagctccctggaacccgaggacttcgccgtgtactactgccagcagagcagcaactggccccggacatttggccagggcaccaaggtggaaatcaag

SEQ ID NO: 1303 - DNA, 459 bp, Artificial Sequence
  chemically synthesized
caaggccagtctggccaaggtcctagggtttgctctactgatggtggtgattattgcttgcttcctggaggtggctcgagcggcggctctatctcttccggactgctgtccggcagatccgacaatcacggcggatccgagatcgtgctgacacagagccctgccaccctgtctctgagccctggcgaaagagccaccctgagctgtagagccagccagagcgtgtccagctacctggcctggtatcagcagaagcccggccaggctccccggctgctgatctacgatgccagcaatagagccaccggcatccccgccagattttccggctctggcagcggcaccgacttcaccctgaccatcagctccctggaacccgaggacttcgccgtgtactactgccagcagagcagcaactggccccggacatttggccagggcaccaaggtggaaatcaag

SEQ ID NO: 1304 - protein, 146 aa, Artificial Sequence
  chemically synthesized
PRPQCHHRHNCPDHPGGGSSGGSISSGLLSGRSDNHGGSEIVLTQSPATLSLSPGERATLSCRASQSVSSYLAWYQQKPGQAPRLLIYDASNRATGIPARFSGSGSGTDFTLTISSLEPEDFAVYYCQQSSNWPRTFGQGTKVEIK

SEQ ID NO: 1305 - protein, 153 aa, Artificial Sequence
  chemically synthesized
QGQSGQGPRPQCHHRHNCPDHPGGGSSGGSISSGLLSGRSDNHGGSEIVLTQSPATLSLSPGERATLSCRASQSVSSYLAWYQQKPGQAPRLLIYDASNRATGIPARFSGSGSGTDFTLTISSLEPEDFAVYYCQQSSNWPRTFGQGTKVEIK

SEQ ID NO: 1306 - DNA, 438 bp, Artificial Sequence
  chemically synthesized
cctcgtccgcagtgccatcatcggcataattgtcctgatcatcctggaggtggctcgagcggcggctctatctcttccggactgctgtccggcagatccgacaatcacggcggatccgagatcgtgctgacacagagccctgccaccctgtctctgagccctggcgaaagagccaccctgagctgtagagccagccagagcgtgtccagctacctggcctggtatcagcagaagcccggccaggctccccggctgctgatctacgatgccagcaatagagccaccggcatccccgccagattttccggctctggcagcggcaccgacttcaccctgaccatcagctccctggaacccgaggacttcgccgtgtactactgccagcagagcagcaactggccccggacatttggccagggcaccaaggtggaaatcaag

SEQ ID NO: 1307 - DNA, 459 bp, Artificial Sequence
  chemically synthesized
caaggccagtctggccaaggtcctcgtccgcagtgccatcatcggcataattgtcctgatcatcctggaggtggctcgagcggcggctctatctcttccggactgctgtccggcagatccgacaatcacggcggatccgagatcgtgctgacacagagccctgccaccctgtctctgagccctggcgaaagagccaccctgagctgtagagccagccagagcgtgtccagctacctggcctggtatcagcagaagcccggccaggctccccggctgctgatctacgatgccagcaatagagccaccggcatccccgccagattttccggctctggcagcggcaccgacttcaccctgaccatcagctccctggaacccgaggacttcgccgtgtactactgccagcagagcagcaactggccccggacatttggccagggcaccaaggtggaaatcaag

SEQ ID NO: 1308 - protein, 146 aa, Artificial Sequence
  chemically synthesized
KCSRPAHQNPDRCSRGGGSSGGSISSGLLSGRSDNHGGSEIVLTQSPATLSLSPGERATLSCRASQSVSSYLAWYQQKPGQAPRLLIYDASNRATGIPARFSGSGSGTDFTLTISSLEPEDFAVYYCQQSSNWPRTFGQGTKVEIK

SEQ ID NO: 1309 - protein, 153 aa, Artificial Sequence
  chemically synthesized
QGQSGQGKCSRPAHQNPDRCSRGGGSSGGSISSGLLSGRSDNHGGSEIVLTQSPATLSLSPGERATLSCRASQSVSSYLAWYQQKPGQAPRLLIYDASNRATGIPARFSGSGSGTDFTLTISSLEPEDFAVYYCQQSSNWPRTFGQGTKVEIK

SEQ ID NO: 1310 - DNA, 438 bp, Artificial Sequence
  chemically synthesized
aagtgctcgcggcctgctcatcagaatccggatcgttgctcgcgaggaggtggctcgagcggcggctctatctcttccggactgctgtccggcagatccgacaatcacggcggatccgagatcgtgctgacacagagccctgccaccctgtctctgagccctggcgaaagagccaccctgagctgtagagccagccagagcgtgtccagctacctggcctggtatcagcagaagcccggccaggctccccggctgctgatctacgatgccagcaatagagccaccggcatccccgccagattttccggctctggcagcggcaccgacttcaccctgaccatcagctccctggaacccgaggacttcgccgtgtactactgccagcagagcagcaactggccccggacatttggccagggcaccaaggtggaaatcaag

SEQ ID NO: 1311 - DNA, 459 bp, Artificial Sequence
  chemically synthesized
caaggccagtctggccaaggtaagtgctcgcggcctgctcatcagaatccggatcgttgctcgcgaggaggtggctcgagcggcggctctatctcttccggactgctgtccggcagatccgacaatcacggcggatccgagatcgtgctgacacagagccctgccaccctgtctctgagccctggcgaaagagccaccctgagctgtagagccagccagagcgtgtccagctacctggcctggtatcagcagaagcccggccaggctccccggctgctgatctacgatgccagcaatagagccaccggcatccccgccagattttccggctctggcagcggcaccgacttcaccctgaccatcagctccctggaacccgaggacttcgccgtgtactactgccagcagagcagcaactggccccggacatttggccagggcaccaaggtggaaatcaag

SEQ ID NO: 1312 - protein, 146 aa, Artificial Sequence
  chemically synthesized
ASYRCPDYKCSHTKHGGGSSGGSISSGLLSGRSDNHGGSEIVLTQSPATLSLSPGERATLSCRASQSVSSYLAWYQQKPGQAPRLLIYDASNRATGIPARFSGSGSGTDFTLTISSLEPEDFAVYYCQQSSNWPRTFGQGTKVEIK

SEQ ID NO: 1313 - protein, 153 aa, Artificial Sequence
  chemically synthesized
QGQSGQGASYRCPDYKCSHTKHGGGSSGGSISSGLLSGRSDNHGGSEIVLTQSPATLSLSPGERATLSCRASQSVSSYLAWYQQKPGQAPRLLIYDASNRATGIPARFSGSGSGTDFTLTISSLEPEDFAVYYCQQSSNWPRTFGQGTKVEIK

SEQ ID NO: 1314 - DNA, 438 bp, Artificial Sequence
  chemically synthesized
gcttcgtatcggtgccctgattataagtgcagtcatactaagcatggaggtggctcgagcggcggctctatctcttccggactgctgtccggcagatccgacaatcacggcggatccgagatcgtgctgacacagagccctgccaccctgtctctgagccctggcgaaagagccaccctgagctgtagagccagccagagcgtgtccagctacctggcctggtatcagcagaagcccggccaggctccccggctgctgatctacgatgccagcaatagagccaccggcatccccgccagattttccggctctggcagcggcaccgacttcaccctgaccatcagctccctggaacccgaggacttcgccgtgtactactgccagcagagcagcaactggccccggacatttggccagggcaccaaggtggaaatcaag

SEQ ID NO: 1315 - DNA, 459 bp, Artificial Sequence
  chemically synthesized
caaggccagtctggccaaggtgcttcgtatcggtgccctgattataagtgcagtcatactaagcatggaggtggctcgagcggcggctctatctcttccggactgctgtccggcagatccgacaatcacggcggatccgagatcgtgctgacacagagccctgccaccctgtctctgagccctggcgaaagagccaccctgagctgtagagccagccagagcgtgtccagctacctggcctggtatcagcagaagcccggccaggctccccggctgctgatctacgatgccagcaatagagccaccggcatccccgccagattttccggctctggcagcggcaccgacttcaccctgaccatcagctccctggaacccgaggacttcgccgtgtactactgccagcagagcagcaactggccccggacatttggccagggcaccaaggtggaaatcaag

SEQ ID NO: 1316 - protein, 146 aa, Artificial Sequence
  chemically synthesized
LPRCPDHPIKCIETKGGGSSGGSISSGLLSGRSDNHGGSEIVLTQSPATLSLSPGERATLSCRASQSVSSYLAWYQQKPGQAPRLLIYDASNRATGIPARFSGSGSGTDFTLTISSLEPEDFAVYYCQQSSNWPRTFGQGTKVEIK

SEQ ID NO: 1317 - protein, 153 aa, Artificial Sequence
  chemically synthesized
QGQSGQGLPRCPDHPIKCIETKGGGSSGGSISSGLLSGRSDNHGGSEIVLTQSPATLSLSPGERATLSCRASQSVSSYLAWYQQKPGQAPRLLIYDASNRATGIPARFSGSGSGTDFTLTISSLEPEDFAVYYCQQSSNWPRTFGQGTKVEIK

SEQ ID NO: 1318 - DNA, 438 bp, Artificial Sequence
  chemically synthesized
ttgccgaggtgcccggatcatccgattaagtgcattgagactaagggaggtggctcgagcggcggctctatctcttccggactgctgtccggcagatccgacaatcacggcggatccgagatcgtgctgacacagagccctgccaccctgtctctgagccctggcgaaagagccaccctgagctgtagagccagccagagcgtgtccagctacctggcctggtatcagcagaagcccggccaggctccccggctgctgatctacgatgccagcaatagagccaccggcatccccgccagattttccggctctggcagcggcaccgacttcaccctgaccatcagctccctggaacccgaggacttcgccgtgtactactgccagcagagcagcaactggccccggacatttggccagggcaccaaggtggaaatcaag

SEQ ID NO: 1319 - DNA, 459 bp, Artificial Sequence
  chemically synthesized
caaggccagtctggccaaggtttgccgaggtgcccggatcatccgattaagtgcattgagactaagggaggtggctcgagcggcggctctatctcttccggactgctgtccggcagatccgacaatcacggcggatccgagatcgtgctgacacagagccctgccaccctgtctctgagccctggcgaaagagccaccctgagctgtagagccagccagagcgtgtccagctacctggcctggtatcagcagaagcccggccaggctccccggctgctgatctacgatgccagcaatagagccaccggcatccccgccagattttccggctctggcagcggcaccgacttcaccctgaccatcagctccctggaacccgaggacttcgccgtgtactactgccagcagagcagcaactggccccggacatttggccagggcaccaaggtggaaatcaag

SEQ ID NO: 1320 - protein, 146 aa, Artificial Sequence
  chemically synthesized
YTFGCPDRYCDRAATGGGSSGGSISSGLLSGRSDNHGGSEIVLTQSPATLSLSPGERATLSCRASQSVSSYLAWYQQKPGQAPRLLIYDASNRATGIPARFSGSGSGTDFTLTISSLEPEDFAVYYCQQSSNWPRTFGQGTKVEIK

SEQ ID NO: 1321 - protein, 153 aa, Artificial Sequence
  chemically synthesized
QGQSGQGYTFGCPDRYCDRAATGGGSSGGSISSGLLSGRSDNHGGSEIVLTQSPATLSLSPGERATLSCRASQSVSSYLAWYQQKPGQAPRLLIYDASNRATGIPARFSGSGSGTDFTLTISSLEPEDFAVYYCQQSSNWPRTFGQGTKVEIK

SEQ ID NO: 1322 - DNA, 438 bp, Artificial Sequence
  chemically synthesized
tatacgtttggttgccctgataggtattgcgatcgtgcggcgacgggaggtggctcgagcggcggctctatctcttccggactgctgtccggcagatccgacaatcacggcggatccgagatcgtgctgacacagagccctgccaccctgtctctgagccctggcgaaagagccaccctgagctgtagagccagccagagcgtgtccagctacctggcctggtatcagcagaagcccggccaggctccccggctgctgatctacgatgccagcaatagagccaccggcatccccgccagattttccggctctggcagcggcaccgacttcaccctgaccatcagctccctggaacccgaggacttcgccgtgtactactgccagcagagcagcaactggccccggacatttggccagggcaccaaggtggaaatcaag

SEQ ID NO: 1323 - DNA, 459 bp, Artificial Sequence
  chemically synthesized
caaggccagtctggccaaggttatacgtttggttgccctgataggtattgcgatcgtgcggcgacgggaggtggctcgagcggcggctctatctcttccggactgctgtccggcagatccgacaatcacggcggatccgagatcgtgctgacacagagccctgccaccctgtctctgagccctggcgaaagagccaccctgagctgtagagccagccagagcgtgtccagctacctggcctggtatcagcagaagcccggccaggctccccggctgctgatctacgatgccagcaatagagccaccggcatccccgccagattttccggctctggcagcggcaccgacttcaccctgaccatcagctccctggaacccgaggacttcgccgtgtactactgccagcagagcagcaactggccccggacatttggccagggcaccaaggtggaaatcaag

SEQ ID NO: 1324 - protein, 146 aa, Artificial Sequence
  chemically synthesized
RGCPDFNPPSHCYTAGGGSSGGSISSGLLSGRSDNHGGSEIVLTQSPATLSLSPGERATLSCRASQSVSSYLAWYQQKPGQAPRLLIYDASNRATGIPARFSGSGSGTDFTLTISSLEPEDFAVYYCQQSSNWPRTFGQGTKVEIK

SEQ ID NO: 1325 - protein, 153 aa, Artificial Sequence
  chemically synthesized
QGQSGQGRGCPDFNPPSHCYTAGGGSSGGSISSGLLSGRSDNHGGSEIVLTQSPATLSLSPGERATLSCRASQSVSSYLAWYQQKPGQAPRLLIYDASNRATGIPARFSGSGSGTDFTLTISSLEPEDFAVYYCQQSSNWPRTFGQGTKVEIK

SEQ ID NO: 1326 - DNA, 438 bp, Artificial Sequence
  chemically synthesized
cgtggttgtccggattttaatcctccttctcattgctatactgctggaggtggctcgagcggcggctctatctcttccggactgctgtccggcagatccgacaatcacggcggatccgagatcgtgctgacacagagccctgccaccctgtctctgagccctggcgaaagagccaccctgagctgtagagccagccagagcgtgtccagctacctggcctggtatcagcagaagcccggccaggctccccggctgctgatctacgatgccagcaatagagccaccggcatccccgccagattttccggctctggcagcggcaccgacttcaccctgaccatcagctccctggaacccgaggacttcgccgtgtactactgccagcagagcagcaactggccccggacatttggccagggcaccaaggtggaaatcaag

SEQ ID NO: 1327 - DNA, 459 bp, Artificial Sequence
  chemically synthesized
caaggccagtctggccaaggtcgtggttgtccggattttaatcctccttctcattgctatactgctggaggtggctcgagcggcggctctatctcttccggactgctgtccggcagatccgacaatcacggcggatccgagatcgtgctgacacagagccctgccaccctgtctctgagccctggcgaaagagccaccctgagctgtagagccagccagagcgtgtccagctacctggcctggtatcagcagaagcccggccaggctccccggctgctgatctacgatgccagcaatagagccaccggcatccccgccagattttccggctctggcagcggcaccgacttcaccctgaccatcagctccctggaacccgaggacttcgccgtgtactactgccagcagagcagcaactggccccggacatttggccagggcaccaaggtggaaatcaag

SEQ ID NO: 1328 - protein, 146 aa, Artificial Sequence
  chemically synthesized
RDYCGPQSPDYCHEIGGGSSGGSISSGLLSGRSDNHGGSEIVLTQSPATLSLSPGERATLSCRASQSVSSYLAWYQQKPGQAPRLLIYDASNRATGIPARFSGSGSGTDFTLTISSLEPEDFAVYYCQQSSNWPRTFGQGTKVEIK

SEQ ID NO: 1329 - protein, 153 aa, Artificial Sequence
  chemically synthesized
QGQSGQGRDYCGPQSPDYCHEIGGGSSGGSISSGLLSGRSDNHGGSEIVLTQSPATLSLSPGERATLSCRASQSVSSYLAWYQQKPGQAPRLLIYDASNRATGIPARFSGSGSGTDFTLTISSLEPEDFAVYYCQQSSNWPRTFGQGTKVEIK

SEQ ID NO: 1330 - DNA, 438 bp, Artificial Sequence
  chemically synthesized
agggattattgcgggcctcagagtcctgattattgccatgagattggaggtggctcgagcggcggctctatctcttccggactgctgtccggcagatccgacaatcacggcggatccgagatcgtgctgacacagagccctgccaccctgtctctgagccctggcgaaagagccaccctgagctgtagagccagccagagcgtgtccagctacctggcctggtatcagcagaagcccggccaggctccccggctgctgatctacgatgccagcaatagagccaccggcatccccgccagattttccggctctggcagcggcaccgacttcaccctgaccatcagctccctggaacccgaggacttcgccgtgtactactgccagcagagcagcaactggccccggacatttggccagggcaccaaggtggaaatcaag

SEQ ID NO: 1331 - DNA, 459 bp, Artificial Sequence
  chemically synthesized
caaggccagtctggccaaggtagggattattgcgggcctcagagtcctgattattgccatgagattggaggtggctcgagcggcggctctatctcttccggactgctgtccggcagatccgacaatcacggcggatccgagatcgtgctgacacagagccctgccaccctgtctctgagccctggcgaaagagccaccctgagctgtagagccagccagagcgtgtccagctacctggcctggtatcagcagaagcccggccaggctccccggctgctgatctacgatgccagcaatagagccaccggcatccccgccagattttccggctctggcagcggcaccgacttcaccctgaccatcagctccctggaacccgaggacttcgccgtgtactactgccagcagagcagcaactggccccggacatttggccagggcaccaaggtggaaatcaag

SEQ ID NO: 1332 - protein, 146 aa, Artificial Sequence
  chemically synthesized
PNKPCPDLQCYVTNYGGGSSGGSISSGLLSGRSDNHGGSEIVLTQSPATLSLSPGERATLSCRASQSVSSYLAWYQQKPGQAPRLLIYDASNRATGIPARFSGSGSGTDFTLTISSLEPEDFAVYYCQQSSNWPRTFGQGTKVEIK

SEQ ID NO: 1333 - protein, 153 aa, Artificial Sequence
  chemically synthesized
QGQSGQGPNKPCPDLQCYVTNYGGGSSGGSISSGLLSGRSDNHGGSEIVLTQSPATLSLSPGERATLSCRASQSVSSYLAWYQQKPGQAPRLLIYDASNRATGIPARFSGSGSGTDFTLTISSLEPEDFAVYYCQQSSNWPRTFGQGTKVEIK

SEQ ID NO: 1334 - DNA, 438 bp, Artificial Sequence
  chemically synthesized
ccgaataagccttgcccggatctgcagtgctatgtgacgaattatggaggtggctcgagcggcggctctatctcttccggactgctgtccggcagatccgacaatcacggcggatccgagatcgtgctgacacagagccctgccaccctgtctctgagccctggcgaaagagccaccctgagctgtagagccagccagagcgtgtccagctacctggcctggtatcagcagaagcccggccaggctccccggctgctgatctacgatgccagcaatagagccaccggcatccccgccagattttccggctctggcagcggcaccgacttcaccctgaccatcagctccctggaacccgaggacttcgccgtgtactactgccagcagagcagcaactggccccggacatttggccagggcaccaaggtggaaatcaag

SEQ ID NO: 1335 - DNA, 459 bp, Artificial Sequence
  chemically synthesized
caaggccagtctggccaaggtccgaataagccttgcccggatctgcagtgctatgtgacgaattatggaggtggctcgagcggcggctctatctcttccggactgctgtccggcagatccgacaatcacggcggatccgagatcgtgctgacacagagccctgccaccctgtctctgagccctggcgaaagagccaccctgagctgtagagccagccagagcgtgtccagctacctggcctggtatcagcagaagcccggccaggctccccggctgctgatctacgatgccagcaatagagccaccggcatccccgccagattttccggctctggcagcggcaccgacttcaccctgaccatcagctccctggaacccgaggacttcgccgtgtactactgccagcagagcagcaactggccccggacatttggccagggcaccaaggtggaaatcaag

SEQ ID NO: 1336 - protein, 146 aa, Artificial Sequence
  chemically synthesized
PRVACGEPDLCYSNTGGGSSGGSISSGLLSGRSDNHGGSEIVLTQSPATLSLSPGERATLSCRASQSVSSYLAWYQQKPGQAPRLLIYDASNRATGIPARFSGSGSGTDFTLTISSLEPEDFAVYYCQQSSNWPRTFGQGTKVEIK

SEQ ID NO: 1337 - protein, 153 aa, Artificial Sequence
  chemically synthesized
QGQSGQGPRVACGEPDLCYSNTGGGSSGGSISSGLLSGRSDNHGGSEIVLTQSPATLSLSPGERATLSCRASQSVSSYLAWYQQKPGQAPRLLIYDASNRATGIPARFSGSGSGTDFTLTISSLEPEDFAVYYCQQSSNWPRTFGQGTKVEIK

SEQ ID NO: 1338 - DNA, 438 bp, Artificial Sequence
  chemically synthesized
ccgcgggttgcttgcggtgagcctgatctttgctattctaatactggaggtggctcgagcggcggctctatctcttccggactgctgtccggcagatccgacaatcacggcggatccgagatcgtgctgacacagagccctgccaccctgtctctgagccctggcgaaagagccaccctgagctgtagagccagccagagcgtgtccagctacctggcctggtatcagcagaagcccggccaggctccccggctgctgatctacgatgccagcaatagagccaccggcatccccgccagattttccggctctggcagcggcaccgacttcaccctgaccatcagctccctggaacccgaggacttcgccgtgtactactgccagcagagcagcaactggccccggacatttggccagggcaccaaggtggaaatcaag

SEQ ID NO: 1339 - DNA, 459 bp, Artificial Sequence
  chemically synthesized
caaggccagtctggccaaggtccgcgggttgcttgcggtgagcctgatctttgctattctaatactggaggtggctcgagcggcggctctatctcttccggactgctgtccggcagatccgacaatcacggcggatccgagatcgtgctgacacagagccctgccaccctgtctctgagccctggcgaaagagccaccctgagctgtagagccagccagagcgtgtccagctacctggcctggtatcagcagaagcccggccaggctccccggctgctgatctacgatgccagcaatagagccaccggcatccccgccagattttccggctctggcagcggcaccgacttcaccctgaccatcagctccctggaacccgaggacttcgccgtgtactactgccagcagagcagcaactggccccggacatttggccagggcaccaaggtggaaatcaag

SEQ ID NO: 1340 - protein, 146 aa, Artificial Sequence
  chemically synthesized
RGCKKHTISTLTCPDGGGSSGGSISSGLLSGRSDNHGGSEIVLTQSPATLSLSPGERATLSCRASQSVSSYLAWYQQKPGQAPRLLIYDASNRATGIPARFSGSGSGTDFTLTISSLEPEDFAVYYCQQSSNWPRTFGQGTKVEIK

SEQ ID NO: 1341 - protein, 153 aa, Artificial Sequence
  chemically synthesized
QGQSGQGRGCKKHTISTLTCPDGGGSSGGSISSGLLSGRSDNHGGSEIVLTQSPATLSLSPGERATLSCRASQSVSSYLAWYQQKPGQAPRLLIYDASNRATGIPARFSGSGSGTDFTLTISSLEPEDFAVYYCQQSSNWPRTFGQGTKVEIK

SEQ ID NO: 1342 - DNA, 438 bp, Artificial Sequence
  chemically synthesized
cgggggtgcaagaagcatactatttcgacgcttacgtgccctgatggaggtggctcgagcggcggctctatctcttccggactgctgtccggcagatccgacaatcacggcggatccgagatcgtgctgacacagagccctgccaccctgtctctgagccctggcgaaagagccaccctgagctgtagagccagccagagcgtgtccagctacctggcctggtatcagcagaagcccggccaggctccccggctgctgatctacgatgccagcaatagagccaccggcatccccgccagattttccggctctggcagcggcaccgacttcaccctgaccatcagctccctggaacccgaggacttcgccgtgtactactgccagcagagcagcaactggccccggacatttggccagggcaccaaggtggaaatcaag

SEQ ID NO: 1343 - DNA, 459 bp, Artificial Sequence
  chemically synthesized
caaggccagtctggccaaggtcgggggtgcaagaagcatactatttcgacgcttacgtgccctgatggaggtggctcgagcggcggctctatctcttccggactgctgtccggcagatccgacaatcacggcggatccgagatcgtgctgacacagagccctgccaccctgtctctgagccctggcgaaagagccaccctgagctgtagagccagccagagcgtgtccagctacctggcctggtatcagcagaagcccggccaggctccccggctgctgatctacgatgccagcaatagagccaccggcatccccgccagattttccggctctggcagcggcaccgacttcaccctgaccatcagctccctggaacccgaggacttcgccgtgtactactgccagcagagcagcaactggccccggacatttggccagggcaccaaggtggaaatcaag

SEQ ID NO: 1344 - protein, 107 aa, Artificial Sequence [sequence omitted]

SEQ ID NO: 1345 - protein, 321 aa, Artificial Sequence
  chemically synthesized
CGTACGGTGGCTGCACCATCTGTCTTCATCTTCCCGCCATCTGATGAGCAGTTGAAATCTGGAACTGCCTCTGTTGTGTGCCTGCTGAATAACTTCTATCCCAGAGAGGCCAAAGTACAGTGGAAGGTGGATAACGCCCTCCAATCGGGTAACTCCCAGGAGAGTGTCACAGAGCAGGACAGCAAGGACAGCACCTACAGCCTCAGCAGCACCCTGACGCTGAGCAAAGCAGACTACGAGAAACACAAAGTCTACGCCTGCGAAGTCACCCATCAGGGCCTGAGCTCGCCCGTCACAAAGAGCTTCAACAGGGGAGAGTGT

SEQ ID NO: 1346 - protein, 113 aa, Artificial Sequence [sequence omitted]

SEQ ID NO: 1347 - DNA, 339 bp, Artificial Sequence
  chemically synthesized
caggtgcagctggtggaatctggcggcggagtggtgcagcctggcagaagcctgagactggactgcaaggccagcggcatcaccttcagcaacagcggcatgcactgggtgcgccaggcccctggaaaaggcctggaatgggtggccgtgatttggtacgacggcagcaagcggtactacgccgacagcgtgaagggccggttcaccatcagccgggacaacagcaagaataccctgttcctgcagatgaacagcctgcgggccgaggacaccgccgtgtactactgcgccaccaacgacgactattggggccagggcacactcgtgaccgtgtcctct

SEQ ID NO: 1348 - protein, 327 aa, Artificial Sequence; identical to SEQ ID NO: 63
  chemically synthesized

SEQ ID NO: 1349 - DNA, 981 bp, Artificial Sequence; identical to SEQ ID NO: 64
  chemically synthesized

SEQ ID NO: 1350 - skipped

SEQ ID NO: 1351 - protein, 15 aa, Artificial Sequence
  chemically synthesized
GCDFTSAKHNCGSGW

SEQ ID NO: 1352 - protein, 15 aa, Artificial Sequence
  chemically synthesized
VGSNCWTGPACALTS

SEQ ID NO: 1353 - protein, 15 aa, Artificial Sequence
  chemically synthesized
FCAVMFDFLSDRCLH

SEQ ID NO: 1354 - protein, 15 aa, Artificial Sequence
  chemically synthesized
FCPPWLDYLGNKCMT

SEQ ID NO: 1355 - protein, 15 aa, Artificial Sequence
  chemically synthesized
MSCWDFSSAQGCGQH

SEQ ID NO: 1356 - protein, 15 aa, Artificial Sequence
  chemically synthesized
LMCADLHYNHYNCKY

SEQ ID NO: 1357 - protein, 15 aa, Artificial Sequence
  chemically synthesized
ELCGWQSFSGVCTSE

SEQ ID NO: 1358 - protein, 15 aa, Artificial Sequence
  chemically synthesized
WTYENCWASCQPHLE

SEQ ID NO: 1359 - protein, 10 aa, Artificial Sequence
  chemically synthesized
KLTEDFSSAA

SEQ ID NO: 1360 - protein, 15 aa, Artificial Sequence
  chemically synthesized
VGQSCFSGLVCDRQL

SEQ ID NO: 1361 - protein, 13 aa, Artificial Sequence
  chemically synthesized
ISHYCFSGKSCRD

SEQ ID NO: 1362 - protein, 15 aa, Artificial Sequence
  chemically synthesized
HCIPDFTSAAGDCMR

SEQ ID NO: 1363 - protein, 9 aa, Artificial Sequence
  chemically synthesized
RLVSAYSFS

SEQ ID NO: 1364 - protein, 15 aa, Artificial Sequence
  chemically synthesized
KFHHSHPLVHDFTSA

SEQ ID NO: 1365 - protein, 15 aa, Artificial Sequence
  chemically synthesized
ASYPDFSSANGVGLR

SEQ ID NO: 1366 - protein, 15 aa, Artificial Sequence
  chemically synthesized
GLATTLSNVDFTSAG

SEQ ID NO: 1367 - protein, 15 aa, Artificial Sequence
  chemically synthesized
DFTSANSAFSGDAST

SEQ ID NO: 1368 - protein, 15 aa, Artificial Sequence
  chemically synthesized
GRLPGHSVVDFTSAW

SEQ ID NO: 1369 - protein, 15 aa, Artificial Sequence
  chemically synthesized
SGSFYSSSAFDFTSA

SEQ ID NO: 1370 - protein, 15 aa, Artificial Sequence
  chemically synthesized
CDDFTSAQHSRINEC

SEQ ID NO: 1371 - protein, 15 aa, Artificial Sequence
  chemically synthesized
CDFTSAQGKKCRTAL

SEQ ID NO: 1372 - protein, 15 aa, Artificial Sequence
  chemically synthesized
YYIDKYQSPSYGPVL

SEQ ID NO: 1373 - protein, 15 aa, Artificial Sequence
  chemically synthesized
FSVARARSSADFTSS

SEQ ID NO: 1374 - protein, 15 aa, Artificial Sequence
  chemically synthesized
DSDFTSAGSADSRSR

SEQ ID NO: 1375 - protein, 15 aa, Artificial Sequence
  chemically synthesized
CDFTSATSISKRCDH

SEQ ID NO: 1376 - protein, 15 aa, Artificial Sequence
  chemically synthesized
IESSASSWGLQASRN

SEQ ID NO: 1377 - protein, 17 aa, Artificial Sequence
  chemically synthesized
PRYHNLNFTTPALSPGS

SEQ ID NO: 1378 - protein, 15 aa, Artificial Sequence
  chemically synthesized
DLFARFPLDRDFTSA

SEQ ID NO: 1379 - protein, 15 aa, Artificial Sequence
  chemically synthesized
HCNFTTPPYCSSTLW

SEQ ID NO: 1380 - protein, 15 aa, Artificial Sequence
  chemically synthesized
NVPIILLTDRQLLSG

SEQ ID NO: 1381 - protein, 15 aa, Artificial Sequence
  chemically synthesized
NPTACDFTSSMATYC

SEQ ID NO: 1382 - protein, 15 aa, Artificial Sequence
  chemically synthesized
FVRTVRFSNSMFSVP

SEQ ID NO: 1383 - protein, 15 aa, Artificial Sequence
  chemically synthesized
YDFSSASNSSPSRQT

SEQ ID NO: 1384 - protein, 15 aa, Artificial Sequence
  chemically synthesized
AHPDFSSAMRGNLLG

SEQ ID NO: 1385 - protein, 15 aa, Artificial Sequence
  chemically synthesized
SSHVVHKDFTSANSR

SEQ ID NO: 1386 - protein, 15 aa, Artificial Sequence
  chemically synthesized
CPDFTSANGGGCWQM

SEQ ID NO: 1387 - protein, 15 aa, Artificial Sequence
  chemically synthesized
SLGQSYPTDFTCPGC

SEQ ID NO: 1388 - protein, 15 aa, Artificial Sequence
  chemically synthesized
ASMRSHEQRDFTSAY

SEQ ID NO: 1389 - protein, 15 aa, Artificial Sequence
  chemically synthesized
SCQFWFTLCSGGVFH

SEQ ID NO: 1390 - protein, 15 aa, Artificial Sequence
  chemically synthesized
PYPNNRTGMHDFTSA

SEQ ID NO: 1391 - protein, 15 aa, Artificial Sequence
  chemically synthesized
KPFPIDFTSAGTSGT

SEQ ID NO: 1392 - protein, 15 aa, Artificial Sequence
  chemically synthesized
SIKSFIPRDDFTSAA

SEQ ID NO: 1393 - protein, 15 aa, Artificial Sequence
  chemically synthesized
GIKNPATPFVDFTSA

SEQ ID NO: 1394 - protein, 15 aa, Artificial Sequence
  chemically synthesized
LSHTYPRGSSTIEAS

SEQ ID NO: 1395 - protein, 9 aa, Artificial Sequence
  chemically synthesized
PSLDFSSAT

SEQ ID NO: 1396 - protein, 15 aa, Artificial Sequence
  chemically synthesized
AFTPRIAPTFDVMKE

SEQ ID NO: 1397 - protein, 13 aa, Artificial Sequence
  chemically synthesized
LCGLQIPPDCERS

SEQ ID NO: 1398 - protein, 15 aa, Artificial Sequence
  chemically synthesized
AAKMVSHSERDFTSA

SEQ ID NO: 1399 - protein, 15 aa, Artificial Sequence
  chemically synthesized
VSVECFSGMQCPHYY

SEQ ID NO: 1400 - protein, 15 aa, Artificial Sequence
  chemically synthesized
ASKCRLPCMASTQIY

SEQ ID NO: 1401 - protein, 15 aa, Artificial Sequence
  chemically synthesized
GLRSCNIYFSIPCTY

SEQ ID NO: 1402 - protein, 15 aa, Artificial Sequence
  chemically synthesized
RGTSDGTLDFTTARS

SEQ ID NO: 1403 - protein, 15 aa, Artificial Sequence
  chemically synthesized
SMYPSASRLLHPQYP

SEQ ID NO: 1404 - protein, 15 aa, Artificial Sequence
  chemically synthesized
HCISCYDFTSAAGSF

SEQ ID NO: 1405 - protein, 15 aa, Artificial Sequence
  chemically synthesized
SSGRWGDAWACARIC

SEQ ID NO: 1406 - protein, 15 aa, Artificial Sequence
  chemically synthesized
RVFSDFTSASHSFGG

SEQ ID NO: 1407 - protein, 15 aa, Artificial Sequence
  chemically synthesized
TDRHSASGRDFTSAH

SEQ ID NO: 1408 - protein, 17 aa, Artificial Sequence
  chemically synthesized
AHCEDFSSAERIATMGC

SEQ ID NO: 1409 - protein, 15 aa, Artificial Sequence
  chemically synthesized
ACDPYSFSIPCDDRL

SEQ ID NO: 1410 - protein, 12 aa, Artificial Sequence
  chemically synthesized
NSPFTLSHIYDR

SEQ ID NO: 1411 - protein, 15 aa, Artificial Sequence
  chemically synthesized
IGTNFTTPSAFVAFP

SEQ ID NO: 1412 - protein, 15 aa, Artificial Sequence
  chemically synthesized
RDAFPIYRNADFSTP

SEQ ID NO: 1413 - protein, 15 aa, Artificial Sequence
  chemically synthesized
SIPNASSYNFTSSSG

SEQ ID NO: 1414 - protein, 15 aa, Artificial Sequence
  chemically synthesized
AGIPDKRHTYDFTSA

SEQ ID NO: 1415 - protein, 15 aa, Artificial Sequence
  chemically synthesized
WPLAHDSRDWNFTTP

SEQ ID NO: 1416 - protein, 15 aa, Artificial Sequence
  chemically synthesized
RHSPSSGHVDFTSAG

SEQ ID NO: 1417 - protein, 15 aa, Artificial Sequence
  chemically synthesized
SCFAWTDPVWNRCSW

SEQ ID NO: 1418 - protein, 15 aa, Artificial Sequence
  chemically synthesized
MPCDWTGPGKIWCGG

SEQ ID NO: 1419 - protein, 15 aa, Artificial Sequence
  chemically synthesized
RDCDFSTANFRSCNK

SEQ ID NO: 1420 - protein, 15 aa, Artificial Sequence
  chemically synthesized
LSCVVSPNYLHCNDH

SEQ ID NO: 1421 - protein, 15 aa, Artificial Sequence
  chemically synthesized
FVCGLYSFSGVCQGV

SEQ ID NO: 1422 - protein, 15 aa, Artificial Sequence
  chemically synthesized
IGLMCFSGLQCPMLA

SEQ ID NO: 1423 - protein, 15 aa, Artificial Sequence
  chemically synthesized
PGMNCFSGEICQMST

SEQ ID NO: 1424 - protein, 15 aa, Artificial Sequence
  chemically synthesized
GDVGSCWASCGLQGG

SEQ ID NO: 1425 - protein, 15 aa, Artificial Sequence
  chemically synthesized
SQFQDCWASCGASFT

SEQ ID NO: 1426 - protein, 15 aa, Artificial Sequence
  chemically synthesized
VGSLNCWYSCGDIWL

SEQ ID NO: 1427 - protein, 15 aa, Artificial Sequence
  chemically synthesized
MCESWLNFLGDQCGM

SEQ ID NO: 1428 - protein, 15 aa, Artificial Sequence
  chemically synthesized
RCMISQSSFSGMCGM

SEQ ID NO: 1429 - protein, 15 aa, Artificial Sequence
  chemically synthesized
NCAPWTSNMSNHCLK

SEQ ID NO: 1430 - protein, 15 aa, Artificial Sequence
  chemically synthesized
LCGVGSATGLELCGV

SEQ ID NO: 1431 - protein, 15 aa, Artificial Sequence
  chemically synthesized
GCDFSSLGGRQPCTP

SEQ ID NO: 1432 - protein, 15 aa, Artificial Sequence
  chemically synthesized
MGCNFTTYPYHTCNT

SEQ ID NO: 1433 - protein, 15 aa, Artificial Sequence
  chemically synthesized
GSCDFTSGAGKKCGS

SEQ ID NO: 1434 - protein, 15 aa, Artificial Sequence
  chemically synthesized
VSCDFTSSHARMCSR

SEQ ID NO: 1435 - protein, 15 aa, Artificial Sequence
  chemically synthesized
MRCTDFYYNHTNCIG

SEQ ID NO: 1436 - protein, 15 aa, Artificial Sequence
  chemically synthesized
RSCDFTSAANKYCAT

SEQ ID NO: 1437 - protein, 15 aa, Artificial Sequence
  chemically synthesized
LYCDSFSVPRPNCAP

SEQ ID NO: 1438 - protein, 15 aa, Artificial Sequence
  chemically synthesized
NSCDFTSARVSKCST

SEQ ID NO: 1439 - protein, 15 aa, Artificial Sequence
  chemically synthesized
STCSDNFTTPMPCNT

SEQ ID NO: 1440 - protein, 15 aa, Artificial Sequence
  chemically synthesized
DICNDRPNLTHCHYF

SEQ ID NO: 1441 - protein, 15 aa, Artificial Sequence
  chemically synthesized
LRCDDFTSAIGCRGY

SEQ ID NO: 1442 - protein, 15 aa, Artificial Sequence
  chemically synthesized
EGCDFTSALHSCNNY

SEQ ID NO: 1443 - protein, 15 aa, Artificial Sequence
  chemically synthesized
RKGCGDFTSASCFVV

SEQ ID NO: 1444 - protein, 15 aa, Artificial Sequence
  chemically synthesized
GMLCAGSSFGLCESM

SEQ ID NO: 1445 - protein, 15 aa, Artificial Sequence
  chemically synthesized
RESCFGSSLGLCTNK

SEQ ID NO: 1446 - protein, 15 aa, Artificial Sequence
  chemically synthesized
ILRCYDIPTNCMNFN

SEQ ID NO: 1447 - protein, 15 aa, Artificial Sequence
  chemically synthesized
NSECTFGAMYCRNKP

SEQ ID NO: 1448 - protein, 15 aa, Artificial Sequence
  chemically synthesized
ASGCFDEDIRCSGGA

SEQ ID NO: 1449 - protein, 15 aa, Artificial Sequence
  chemically synthesized
HYFCNQSNPSCQTAP

SEQ ID NO: 1450 - protein, 15 aa, Artificial Sequence
  chemically synthesized
AMGCELGGAGCIGSP

SEQ ID NO: 1451 - protein, 15 aa, Artificial Sequence
  chemically synthesized
TLKCHMPRKLCANDP

SEQ ID NO: 1452 - protein, 15 aa, Artificial Sequence
  chemically synthesized
RPACRDLPHNCITST

SEQ ID NO: 1453 - protein, 15 aa, Artificial Sequence
  chemically synthesized
QMSCHGNFTTCHSNP

SEQ ID NO: 1454 - protein, 15 aa, Artificial Sequence
  chemically synthesized
LTGCARGARPCRLRV

SEQ ID NO: 1455 - protein, 15 aa, Artificial Sequence
  chemically synthesized
WSELCLAGPSCGWVG

SEQ ID NO: 1456 - protein, 15 aa, Artificial Sequence
  chemically synthesized
VTKSCWQLPHCITAP

SEQ ID NO: 1457 - protein, 15 aa, Artificial Sequence
  chemically synthesized
KAASCPHNQICNMTA

SEQ ID NO: 1458 - protein, 15 aa, Artificial Sequence
  chemically synthesized
VSKNCFSGMMCPVFA

SEQ ID NO: 1459 - protein, 15 aa, Artificial Sequence
  chemically synthesized
NRSSCWTGPTCHVLH

SEQ ID NO: 1460 - protein, 15 aa, Artificial Sequence
  chemically synthesized
ARTGCSGPVCLNDVS

SEQ ID NO: 1461 - protein, 15 aa, Artificial Sequence
  chemically synthesized
STRTCLAFTCINGNT

SEQ ID NO: 1462 - protein, 15 aa, Artificial Sequence
  chemically synthesized
MLDGNCWYACSYKNT

SEQ ID NO: 1463 - protein, 15 aa, Artificial Sequence
  chemically synthesized
FSRSDCWSACAPWRV

SEQ ID NO: 1464 - protein, 15 aa, Artificial Sequence
  chemically synthesized
GGRMDCWASCQPLSR

SEQ ID NO: 1465 - protein, 15 aa, Artificial Sequence
  chemically synthesized
NSPHSCMTNCDFTSA

SEQ ID NO: 1466 - protein, 147 aa, Artificial Sequence
  chemically synthesized
CDFTSAKHNCGSGWGSSGGSISSGLLSGRSDNHGGSEIVLTQSPATLSLSPGERATLSCRASKGVSTSGYSYLHWYQQKPGQAPRLLIYLASYLESGVPARFSGSGSGTDFTLTISSLEPEDFAVYYCQHSRDLPLTFGGGTKVEIK

SEQ ID NO: 1467 - protein, 154 aa, Artificial Sequence
  chemically synthesized
QGQSGQGCDFTSAKHNCGSGWGSSGGSISSGLLSGRSDNHGGSEIVLTQSPATLSLSPGERATLSCRASKGVSTSGYSYLHWYQQKPGQAPRLLIYLASYLESGVPARFSGSGSGTDFTLTISSLEPEDFAVYYCQHSRDLPLTFGGGTKVEIK

SEQ ID NO: 1468 - DNA, 441 bp, Artificial Sequence
  chemically synthesized
tgcgattttacttctgccaagcacaattgcggctctggctggggctcgagcggcggctctatctcttccggactgctgtccggcagatccgacaatcacggcggatccgagatcgtgctgacacagagccctgccaccctgtctctgagccctggcgaaagagccaccctgagctgtagagcctctaagggcgtgtccaccagcggctacagctacctgcactggtatcagcagaagcccggccaggcccccagactgctgatctacctggcctcctacctggaaagcggcgtgcccgccagattttctggctctggcagcggcaccgacttcaccctgacaatcagcagcctggaacccgaggacttcgccgtgtactactgccagcacagcagggacctgcccctgacatttggcggaggcaccaaggtggaaatcaag

SEQ ID NO: 1469 - DNA, 462 bp, Artificial Sequence
  chemically synthesized
caaggccagtctggccaaggatgcgattttacttctgccaagcacaattgcggctctggctggggctcgagcggcggctctatctcttccggactgctgtccggcagatccgacaatcacggcggatccgagatcgtgctgacacagagccctgccaccctgtctctgagccctggcgaaagagccaccctgagctgtagagcctctaagggcgtgtccaccagcggctacagctacctgcactggtatcagcagaagcccggccaggcccccagactgctgatctacctggcctcctacctggaaagcggcgtgcccgccagattttctggctctggcagcggcaccgacttcaccctgacaatcagcagcctggaacccgaggacttcgccgtgtactactgccagcacagcagggacctgcccctgacatttggcggaggcaccaaggtggaaatcaag

SEQ ID NO: 1470 - protein, 150 aa, Artificial Sequence
  chemically synthesized
VGSNCWTGPACALTSGGGSSGGSISSGLLSGRSDNHGGSEIVLTQSPATLSLSPGERATLSCRASKGVSTSGYSYLHWYQQKPGQAPRLLIYLASYLESGVPARFSGSGSGTDFTLTISSLEPEDFAVYYCQHSRDLPLTFGGGTKVEIK

SEQ ID NO: 1471 - protein, 157 aa, Artificial Sequence
  chemically synthesized
QGQSGQGVGSNCWTGPACALTSGGGSSGGSISSGLLSGRSDNHGGSEIVLTQSPATLSLSPGERATLSCRASKGVSTSGYSYLHWYQQKPGQAPRLLIYLASYLESGVPARFSGSGSGTDFTLTISSLEPEDFAVYYCQHSRDLPLTFGGGTKVEIK

SEQ ID NO: 1472 - DNA, 450 bp, Artificial Sequence
  chemically synthesized
gttgggtcgaattgctggacggggccggcgtgcgctttgacgtcgggaggtggctcgagcggcggctctatctcttccggactgctgtccggcagatccgacaatcacggcggatccgagatcgtgctgacacagagccctgccaccctgtctctgagccctggcgaaagagccaccctgagctgtagagcctctaagggcgtgtccaccagcggctacagctacctgcactggtatcagcagaagcccggccaggcccccagactgctgatctacctggcctcctacctggaaagcggcgtgcccgccagattttctggctctggcagcggcaccgacttcaccctgacaatcagcagcctggaacccgaggacttcgccgtgtactactgccagcacagcagggacctgcccctgacatttggcggaggcaccaaggtggaaatcaag

SEQ ID NO: 1473 - DNA, 471 bp, Artificial Sequence
  chemically synthesized
caaggccagtctggccaaggtgttgggtcgaattgctggacggggccggcgtgcgctttgacgtcgggaggtggctcgagcggcggctctatctcttccggactgctgtccggcagatccgacaatcacggcggatccgagatcgtgctgacacagagccctgccaccctgtctctgagccctggcgaaagagccaccctgagctgtagagcctctaagggcgtgtccaccagcggctacagctacctgcactggtatcagcagaagcccggccaggcccccagactgctgatctacctggcctcctacctggaaagcggcgtgcccgccagattttctggctctggcagcggcaccgacttcaccctgacaatcagcagcctggaacccgaggacttcgccgtgtactactgccagcacagcagggacctgcccctgacatttggcggaggcaccaaggtggaaatcaag

SEQ ID NO: 1474 - protein, 150 aa, Artificial Sequence
  chemically synthesized
FCAVMFDFLSDRCLHGGGSSGGSISSGLLSGRSDNHGGSEIVLTQSPATLSLSPGERATLSCRASKGVSTSGYSYLHWYQQKPGQAPRLLIYLASYLESGVPARFSGSGSGTDFTLTISSLEPEDFAVYYCQHSRDLPLTFGGGTKVEIK

SEQ ID NO: 1475 - protein, 157 aa, Artificial Sequence
  chemically synthesized
QGQSGQGFCAVMFDFLSDRCLHGGGSSGGSISSGLLSGRSDNHGGSEIVLTQSPATLSLSPGERATLSCRASKGVSTSGYSYLHWYQQKPGQAPRLLIYLASYLESGVPARFSGSGSGTDFTLTISSLEPEDFAVYYCQHSRDLPLTFGGGTKVEIK

SEQ ID NO: 1476 - DNA, 450 bp, Artificial Sequence
  chemically synthesized
ttttgcgctgtgatgtttgattttctgtctgatcggtgcctgcatggaggtggctcgagcggcggctctatctcttccggactgctgtccggcagatccgacaatcacggcggatccgagatcgtgctgacacagagccctgccaccctgtctctgagccctggcgaaagagccaccctgagctgtagagcctctaagggcgtgtccaccagcggctacagctacctgcactggtatcagcagaagcccggccaggcccccagactgctgatctacctggcctcctacctggaaagcggcgtgcccgccagattttctggctctggcagcggcaccgacttcaccctgacaatcagcagcctggaacccgaggacttcgccgtgtactactgccagcacagcagggacctgcccctgacatttggcggaggcaccaaggtggaaatcaag

SEQ ID NO: 1477 - DNA, 471 bp, Artificial Sequence
  chemically synthesized
caaggccagtctggccaaggtttttgcgctgtgatgtttgattttctgtctgatcggtgcctgcatggaggtggctcgagcggcggctctatctcttccggactgctgtccggcagatccgacaatcacggcggatccgagatcgtgctgacacagagccctgccaccctgtctctgagccctggcgaaagagccaccctgagctgtagagcctctaagggcgtgtccaccagcggctacagctacctgcactggtatcagcagaagcccggccaggcccccagactgctgatctacctggcctcctacctggaaagcggcgtgcccgccagattttctggctctggcagcggcaccgacttcaccctgacaatcagcagcctggaacccgaggacttcgccgtgtactactgccagcacagcagggacctgcccctgacatttggcggaggcaccaaggtggaaatcaag

SEQ ID NO: 1478 - protein, 150 aa, Artificial Sequence
  chemically synthesized
FCPPWLDYLGNKCMTGGGSSGGSISSGLLSGRSDNHGGSEIVLTQSPATLSLSPGERATLSCRASKGVSTSGYSYLHWYQQKPGQAPRLLIYLASYLESGVPARFSGSGSGTDFTLTISSLEPEDFAVYYCQHSRDLPLTFGGGTKVEIK

SEQ ID NO: 1479 - protein, 157 aa, Artificial Sequence
  chemically synthesized
QGQSGQGFCPPWLDYLGNKCMTGGGSSGGSISSGLLSGRSDNHGGSEIVLTQSPATLSLSPGERATLSCRASKGVSTSGYSYLHWYQQKPGQAPRLLIYLASYLESGVPARFSGSGSGTDFTLTISSLEPEDFAVYYCQHSRDLPLTFGGGTKVEIK

SEQ ID NO: 1480 - DNA, 450 bp, Artificial Sequence
  chemically synthesized
ttttgcccgccgtggttggattatttgggtaataagtgcatgacgggaggtggctcgagcggcggctctatctcttccggactgctgtccggcagatccgacaatcacggcggatccgagatcgtgctgacacagagccctgccaccctgtctctgagccctggcgaaagagccaccctgagctgtagagcctctaagggcgtgtccaccagcggctacagctacctgcactggtatcagcagaagcccggccaggcccccagactgctgatctacctggcctcctacctggaaagcggcgtgcccgccagattttctggctctggcagcggcaccgacttcaccctgacaatcagcagcctggaacccgaggacttcgccgtgtactactgccagcacagcagggacctgcccctgacatttggcggaggcaccaaggtggaaatcaag

SEQ ID NO: 1481 - DNA, 471 bp, Artificial Sequence
  chemically synthesized
caaggccagtctggccaaggtttttgcccgccgtggttggattatttgggtaataagtgcatgacgggaggtggctcgagcggcggctctatctcttccggactgctgtccggcagatccgacaatcacggcggatccgagatcgtgctgacacagagccctgccaccctgtctctgagccctggcgaaagagccaccctgagctgtagagcctctaagggcgtgtccaccagcggctacagctacctgcactggtatcagcagaagcccggccaggcccccagactgctgatctacctggcctcctacctggaaagcggcgtgcccgccagattttctggctctggcagcggcaccgacttcaccctgacaatcagcagcctggaacccgaggacttcgccgtgtactactgccagcacagcagggacctgcccctgacatttggcggaggcaccaaggtggaaatcaag

SEQ ID NO: 1482 - protein, 150 aa, Artificial Sequence
  chemically synthesized
MSCWDFSSAQGCGQHGGGSSGGSISSGLLSGRSDNHGGSEIVLTQSPATLSLSPGERATLSCRASKGVSTSGYSYLHWYQQKPGQAPRLLIYLASYLESGVPARFSGSGSGTDFTLTISSLEPEDFAVYYCQHSRDLPLTFGGGTKVEIK

SEQ ID NO: 1483 - protein, 157 aa, Artificial Sequence
  chemically synthesized
QGQSGQGMSCWDFSSAQGCGQHGGGSSGGSISSGLLSGRSDNHGGSEIVLTQSPATLSLSPGERATLSCRASKGVSTSGYSYLHWYQQKPGQAPRLLIYLASYLESGVPARFSGSGSGTDFTLTISSLEPEDFAVYYCQHSRDLPLTFGGGTKVEIK

SEQ ID NO: 1484 - DNA, 450 bp, Artificial Sequence
  chemically synthesized
atgtcttgctgggatttttcttcggctcaggggtgcggtcagcatggaggtggctcgagcggcggctctatctcttccggactgctgtccggcagatccgacaatcacggcggatccgagatcgtgctgacacagagccctgccaccctgtctctgagccctggcgaaagagccaccctgagctgtagagcctctaagggcgtgtccaccagcggctacagctacctgcactggtatcagcagaagcccggccaggcccccagactgctgatctacctggcctcctacctggaaagcggcgtgcccgccagattttctggctctggcagcggcaccgacttcaccctgacaatcagcagcctggaacccgaggacttcgccgtgtactactgccagcacagcagggacctgcccctgacatttggcggaggcaccaaggtggaaatcaag

SEQ ID NO: 1485 - DNA, 471 bp, Artificial Sequence
  chemically synthesized
caaggccagtctggccaaggtatgtcttgctgggatttttcttcggctcaggggtgcggtcagcatggaggtggctcgagcggcggctctatctcttccggactgctgtccggcagatccgacaatcacggcggatccgagatcgtgctgacacagagccctgccaccctgtctctgagccctggcgaaagagccaccctgagctgtagagcctctaagggcgtgtccaccagcggctacagctacctgcactggtatcagcagaagcccggccaggcccccagactgctgatctacctggcctcctacctggaaagcggcgtgcccgccagattttctggctctggcagcggcaccgacttcaccctgacaatcagcagcctggaacccgaggacttcgccgtgtactactgccagcacagcagggacctgcccctgacatttggcggaggcaccaaggtggaaatcaag

SEQ ID NO: 1486 - protein, 150 aa, Artificial Sequence
  chemically synthesized
LMCADLHYNHYNCKYGGGSSGGSISSGLLSGRSDNHGGSEIVLTQSPATLSLSPGERATLSCRASKGVSTSGYSYLHWYQQKPGQAPRLLIYLASYLESGVPARFSGSGSGTDFTLTISSLEPEDFAVYYCQHSRDLPLTFGGGTKVEIK

SEQ ID NO: 1487 - protein, 157 aa, Artificial Sequence
  chemically synthesized
QGQSGQGLMCADLHYNHYNCKYGGGSSGGSISSGLLSGRSDNHGGSEIVLTQSPATLSLSPGERATLSCRASKGVSTSGYSYLHWYQQKPGQAPRLLIYLASYLESGVPARFSGSGSGTDFTLTISSLEPEDFAVYYCQHSRDLPLTFGGGTKVEIK

SEQ ID NO: 1488 - DNA, 450 bp, Artificial Sequence
  chemically synthesized
ttgatgtgcgctgatttgcattataatcattataattgcaagtatggaggtggctcgagcggcggctctatctcttccggactgctgtccggcagatccgacaatcacggcggatccgagatcgtgctgacacagagccctgccaccctgtctctgagccctggcgaaagagccaccctgagctgtagagcctctaagggcgtgtccaccagcggctacagctacctgcactggtatcagcagaagcccggccaggcccccagactgctgatctacctggcctcctacctggaaagcggcgtgcccgccagattttctggctctggcagcggcaccgacttcaccctgacaatcagcagcctggaacccgaggacttcgccgtgtactactgccagcacagcagggacctgcccctgacatttggcggaggcaccaaggtggaaatcaag

SEQ ID NO: 1489 - DNA, 471 bp, Artificial Sequence
  chemically synthesized
caaggccagtctggccaaggtttgatgtgcgctgatttgcattataatcattataattgcaagtatggaggtggctcgagcggcggctctatctcttccggactgctgtccggcagatccgacaatcacggcggatccgagatcgtgctgacacagagccctgccaccctgtctctgagccctggcgaaagagccaccctgagctgtagagcctctaagggcgtgtccaccagcggctacagctacctgcactggtatcagcagaagcccggccaggcccccagactgctgatctacctggcctcctacctggaaagcggcgtgcccgccagattttctggctctggcagcggcaccgacttcaccctgacaatcagcagcctggaacccgaggacttcgccgtgtactactgccagcacagcagggacctgcccctgacatttggcggaggcaccaaggtggaaatcaag

SEQ ID NO: 1490 - protein, 150 aa, Artificial Sequence
  chemically synthesized
ELCGWQSFSGVCTSEGGGSSGGSISSGLLSGRSDNHGGSEIVLTQSPATLSLSPGERATLSCRASKGVSTSGYSYLHWYQQKPGQAPRLLIYLASYLESGVPARFSGSGSGTDFTLTISSLEPEDFAVYYCQHSRDLPLTFGGGTKVEIK

SEQ ID NO: 1491 - protein, 157 aa, Artificial Sequence
  chemically synthesized
QGQSGQGELCGWQSFSGVCTSEGGGSSGGSISSGLLSGRSDNHGGSEIVLTQSPATLSLSPGERATLSCRASKGVSTSGYSYLHWYQQKPGQAPRLLIYLASYLESGVPARFSGSGSGTDFTLTISSLEPEDFAVYYCQHSRDLPLTFGGGTKVEIK

SEQ ID NO: 1492 - DNA, 450 bp, Artificial Sequence
  chemically synthesized
gagttgtgcggttggcagagtttttcgggggtttgcactagtgagggaggtggctcgagcggcggctctatctcttccggactgctgtccggcagatccgacaatcacggcggatccgagatcgtgctgacacagagccctgccaccctgtctctgagccctggcgaaagagccaccctgagctgtagagcctctaagggcgtgtccaccagcggctacagctacctgcactggtatcagcagaagcccggccaggcccccagactgctgatctacctggcctcctacctggaaagcggcgtgcccgccagattttctggctctggcagcggcaccgacttcaccctgacaatcagcagcctggaacccgaggacttcgccgtgtactactgccagcacagcagggacctgcccctgacatttggcggaggcaccaaggtggaaatcaag

SEQ ID NO: 1493 - DNA, 471 bp, Artificial Sequence
  chemically synthesized
caaggccagtctggccaaggtgagttgtgcggttggcagagtttttcgggggtttgcactagtgagggaggtggctcgagcggcggctctatctcttccggactgctgtccggcagatccgacaatcacggcggatccgagatcgtgctgacacagagccctgccaccctgtctctgagccctggcgaaagagccaccctgagctgtagagcctctaagggcgtgtccaccagcggctacagctacctgcactggtatcagcagaagcccggccaggcccccagactgctgatctacctggcctcctacctggaaagcggcgtgcccgccagattttctggctctggcagcggcaccgacttcaccctgacaatcagcagcctggaacccgaggacttcgccgtgtactactgccagcacagcagggacctgcccctgacatttggcggaggcaccaaggtggaaatcaag

SEQ ID NO: 1494 - protein, 150 aa, Artificial Sequence
  chemically synthesized
WTYENCWASCQPHLEGGGSSGGSISSGLLSGRSDNHGGSEIVLTQSPATLSLSPGERATLSCRASKGVSTSGYSYLHWYQQKPGQAPRLLIYLASYLESGVPARFSGSGSGTDFTLTISSLEPEDFAVYYCQHSRDLPLTFGGGTKVEIK

SEQ ID NO: 1495 - protein, 157 aa, Artificial Sequence
  chemically synthesized
QGQSGQGWTYENCWASCQPHLEGGGSSGGSISSGLLSGRSDNHGGSEIVLTQSPATLSLSPGERATLSCRASKGVSTSGYSYLHWYQQKPGQAPRLLIYLASYLESGVPARFSGSGSGTDFTLTISSLEPEDFAVYYCQHSRDLPLTFGGGTKVEIK

SEQ ID NO: 1496 - DNA, 450 bp, Artificial Sequence
  chemically synthesized
tggacttatgagaattgctgggcttcgtgccagcctcatttggagggaggtggctcgagcggcggctctatctcttccggactgctgtccggcagatccgacaatcacggcggatccgagatcgtgctgacacagagccctgccaccctgtctctgagccctggcgaaagagccaccctgagctgtagagcctctaagggcgtgtccaccagcggctacagctacctgcactggtatcagcagaagcccggccaggcccccagactgctgatctacctggcctcctacctggaaagcggcgtgcccgccagattttctggctctggcagcggcaccgacttcaccctgacaatcagcagcctggaacccgaggacttcgccgtgtactactgccagcacagcagggacctgcccctgacatttggcggaggcaccaaggtggaaatcaag

SEQ ID NO: 1497 - DNA, 471 bp, Artificial Sequence
  chemically synthesized
caaggccagtctggccaaggttggacttatgagaattgctgggcttcgtgccagcctcatttggagggaggtggctcgagcggcggctctatctcttccggactgctgtccggcagatccgacaatcacggcggatccgagatcgtgctgacacagagccctgccaccctgtctctgagccctggcgaaagagccaccctgagctgtagagcctctaagggcgtgtccaccagcggctacagctacctgcactggtatcagcagaagcccggccaggcccccagactgctgatctacctggcctcctacctggaaagcggcgtgcccgccagattttctggctctggcagcggcaccgacttcaccctgacaatcagcagcctggaacccgaggacttcgccgtgtactactgccagcacagcagggacctgcccctgacatttggcggaggcaccaaggtggaaatcaag

SEQ ID NO: 1498 - protein, 143 aa, Artificial Sequence
  chemically synthesized
KLTEDFSSAAGSSGGSISSGLLSGRSDNHGGSEIVLTQSPATLSLSPGERATLSCRASKGVSTSGYSYLHWYQQKPGQAPRLLIYLASYLESGVPARFSGSGSGTDFTLTISSLEPEDFAVYYCQHSRDLPLTFGGGTKVEIK

SEQ ID NO: 1499 - protein, 149 aa, Artificial Sequence
  chemically synthesized
QGQSGQKLTEDFSSAAGSSGGSISSGLLSGRSDNHGGSEIVLTQSPATLSLSPGERATLSCRASKGVSTSGYSYLHWYQQKPGQAPRLLIYLASYLESGVPARFSGSGSGTDFTLTISSLEPEDFAVYYCQHSRDLPLTFGGGTKVEIK

SEQ ID NO: 1500 - DNA, 429 bp, Artificial Sequence
  chemically synthesized
aagcttactgaggatttttctagcgcagcaggctcgagcggcggctctatctcttccggactgctgtccggcagatccgacaatcacggcggatccgagatcgtgctgacacagagccctgccaccctgtctctgagccctggcgaaagagccaccctgagctgtagagcctctaagggcgtgtccaccagcggctacagctacctgcactggtatcagcagaagcccggccaggcccccagactgctgatctacctggcctcctacctggaaagcggcgtgcccgccagattttctggctctggcagcggcaccgacttcaccctgacaatcagcagcctggaacccgaggacttcgccgtgtactactgccagcacagcagggacctgcccctgacatttggcggaggcaccaaggtggaaatcaag

SEQ ID NO: 1501 - DNA, 447 bp, Artificial Sequence
  chemically synthesized
caaggccagtctggccaaaagcttactgaggatttttctagcgcagcaggctcgagcggcggctctatctcttccggactgctgtccggcagatccgacaatcacggcggatccgagatcgtgctgacacagagccctgccaccctgtctctgagccctggcgaaagagccaccctgagctgtagagcctctaagggcgtgtccaccagcggctacagctacctgcactggtatcagcagaagcccggccaggcccccagactgctgatctacctggcctcctacctggaaagcggcgtgcccgccagattttctggctctggcagcggcaccgacttcaccctgacaatcagcagcctggaacccgaggacttcgccgtgtactactgccagcacagcagggacctgcccctgacatttggcggaggcaccaaggtggaaatcaag

SEQ ID NO: 1502 - protein, 150 aa, Artificial Sequence
  chemically synthesized
VGQSCFSGLVCDRQLGGGSSGGSISSGLLSGRSDNHGGSEIVLTQSPATLSLSPGERATLSCRASKGVSTSGYSYLHWYQQKPGQAPRLLIYLASYLESGVPARFSGSGSGTDFTLTISSLEPEDFAVYYCQHSRDLPLTFGGGTKVEIK

SEQ ID NO: 1503 - protein, 157 aa, Artificial Sequence
  chemically synthesized
QGQSGQGVGQSCFSGLVCDRQLGGGSSGGSISSGLLSGRSDNHGGSEIVLTQSPATLSLSPGERATLSCRASKGVSTSGYSYLHWYQQKPGQAPRLLIYLASYLESGVPARFSGSGSGTDFTLTISSLEPEDFAVYYCQHSRDLPLTFGGGTKVEIK

SEQ ID NO: 1504 - DNA, 450 bp, Artificial Sequence
  chemically synthesized
gtggggcagagttgcttttctgggctggtttgcgataggcagctgggaggtggctcgagcggcggctctatctcttccggactgctgtccggcagatccgacaatcacggcggatccgagatcgtgctgacacagagccctgccaccctgtctctgagccctggcgaaagagccaccctgagctgtagagcctctaagggcgtgtccaccagcggctacagctacctgcactggtatcagcagaagcccggccaggcccccagactgctgatctacctggcctcctacctggaaagcggcgtgcccgccagattttctggctctggcagcggcaccgacttcaccctgacaatcagcagcctggaacccgaggacttcgccgtgtactactgccagcacagcagggacctgcccctgacatttggcggaggcaccaaggtggaaatcaag

SEQ ID NO: 1505 - DNA, 471 bp, Artificial Sequence
  chemically synthesized
caaggccagtctggccaaggtgtggggcagagttgcttttctgggctggtttgcgataggcagctgggaggtggctcgagcggcggctctatctcttccggactgctgtccggcagatccgacaatcacggcggatccgagatcgtgctgacacagagccctgccaccctgtctctgagccctggcgaaagagccaccctgagctgtagagcctctaagggcgtgtccaccagcggctacagctacctgcactggtatcagcagaagcccggccaggcccccagactgctgatctacctggcctcctacctggaaagcggcgtgcccgccagattttctggctctggcagcggcaccgacttcaccctgacaatcagcagcctggaacccgaggacttcgccgtgtactactgccagcacagcagggacctgcccctgacatttggcggaggcaccaaggtggaaatcaag

SEQ ID NO: 1506 - protein, 146 aa, Artificial Sequence
  chemically synthesized
ISHYCFSGKSCRDGSSGGSISSGLLSGRSDNHGGSEIVLTQSPATLSLSPGERATLSCRASKGVSTSGYSYLHWYQQKPGQAPRLLIYLASYLESGVPARFSGSGSGTDFTLTISSLEPEDFAVYYCQHSRDLPLTFGGGTKVEIK

SEQ ID NO: 1507 - protein, 152 aa, Artificial Sequence
  chemically synthesized
QGQSGQISHYCFSGKSCRDGSSGGSISSGLLSGRSDNHGGSEIVLTQSPATLSLSPGERATLSCRASKGVSTSGYSYLHWYQQKPGQAPRLLIYLASYLESGVPARFSGSGSGTDFTLTISSLEPEDFAVYYCQHSRDLPLTFGGGTKVEIK

SEQ ID NO: 1508 - DNA, 438 bp, Artificial Sequence
  chemically synthesized
atctctcactattgtttcagtggcaaatcctgcagggacggctcgagcggcggctctatctcttccggactgctgtccggcagatccgacaatcacggcggatccgagatcgtgctgacacagagccctgccaccctgtctctgagccctggcgaaagagccaccctgagctgtagagcctctaagggcgtgtccaccagcggctacagctacctgcactggtatcagcagaagcccggccaggcccccagactgctgatctacctggcctcctacctggaaagcggcgtgcccgccagattttctggctctggcagcggcaccgacttcaccctgacaatcagcagcctggaacccgaggacttcgccgtgtactactgccagcacagcagggacctgcccctgacatttggcggaggcaccaaggtggaaatcaag

SEQ ID NO: 1509 - DNA, 456 bp, Artificial Sequence
  chemically synthesized
caaggccagtctggccaaatctctcactattgtttcagtggcaaatcctgcagggacggctcgagcggcggctctatctcttccggactgctgtccggcagatccgacaatcacggcggatccgagatcgtgctgacacagagccctgccaccctgtctctgagccctggcgaaagagccaccctgagctgtagagcctctaagggcgtgtccaccagcggctacagctacctgcactggtatcagcagaagcccggccaggcccccagactgctgatctacctggcctcctacctggaaagcggcgtgcccgccagattttctggctctggcagcggcaccgacttcaccctgacaatcagcagcctggaacccgaggacttcgccgtgtactactgccagcacagcagggacctgcccctgacatttggcggaggcaccaaggtggaaatcaag

SEQ ID NO: 1510 - protein, 150 aa, Artificial Sequence
  chemically synthesized
HCIPDFTSAAGDCMRGGGSSGGSISSGLLSGRSDNHGGSEIVLTQSPATLSLSPGERATLSCRASKGVSTSGYSYLHWYQQKPGQAPRLLIYLASYLESGVPARFSGSGSGTDFTLTISSLEPEDFAVYYCQHSRDLPLTFGGGTKVEIK

SEQ ID NO: 1511 - protein, 157 aa, Artificial Sequence
  chemically synthesized
QGQSGQGHCIPDFTSAAGDCMRGGGSSGGSISSGLLSGRSDNHGGSEIVLTQSPATLSLSPGERATLSCRASKGVSTSGYSYLHWYQQKPGQAPRLLIYLASYLESGVPARFSGSGSGTDFTLTISSLEPEDFAVYYCQHSRDLPLTFGGGTKVEIK

SEQ ID NO: 1512 - DNA, 450 bp, Artificial Sequence
  chemically synthesized
cattgcattcctgattttacttctgctgctggtgattgcatgaggggaggtggctcgagcggcggctctatctcttccggactgctgtccggcagatccgacaatcacggcggatccgagatcgtgctgacacagagccctgccaccctgtctctgagccctggcgaaagagccaccctgagctgtagagcctctaagggcgtgtccaccagcggctacagctacctgcactggtatcagcagaagcccggccaggcccccagactgctgatctacctggcctcctacctggaaagcggcgtgcccgccagattttctggctctggcagcggcaccgacttcaccctgacaatcagcagcctggaacccgaggacttcgccgtgtactactgccagcacagcagggacctgcccctgacatttggcggaggcaccaaggtggaaatcaag

SEQ ID NO: 1513 - DNA, 471 bp, Artificial Sequence
  chemically synthesized
caaggccagtctggccaaggtcattgcattcctgattttacttctgctgctggtgattgcatgaggggaggtggctcgagcggcggctctatctcttccggactgctgtccggcagatccgacaatcacggcggatccgagatcgtgctgacacagagccctgccaccctgtctctgagccctggcgaaagagccaccctgagctgtagagcctctaagggcgtgtccaccagcggctacagctacctgcactggtatcagcagaagcccggccaggcccccagactgctgatctacctggcctcctacctggaaagcggcgtgcccgccagattttctggctctggcagcggcaccgacttcaccctgacaatcagcagcctggaacccgaggacttcgccgtgtactactgccagcacagcagggacctgcccctgacatttggcggaggcaccaaggtggaaatcaag

SEQ ID NO: 1514 - protein, 120 aa, Artificial Sequence [sequence omitted]

SEQ ID NO: 1515 - DNA, 360 bp, Artificial Sequence
  chemically synthesized
caggtgcagctggtgcagtctggcgtggaagtgaagaaaccaggcgccagcgtgaaggtgtcctgcaaggccagcggctacacctttaccaactactacatgtactgggtgcgccaggccccaggccagggactggaatggatgggcggcatcaaccccagcaacggcggcaccaacttcaacgagaagttcaagaacagagtgaccctgaccaccgacagcagcaccaccaccgcctacatggaactgaagtccctgcagttcgacgacaccgccgtgtactactgcgccagacgggactacagattcgacatgggcttcgactactggggccagggcacaaccgtgaccgtgtctagt

SEQ ID NO: 1516 - protein, 330 aa, Artificial Sequence
  chemically synthesized
AKTTAPSVYPLAPVCGDTTGSSVTLGCLVKGYFPEPVTLTWNSGSLSSGVHTFPAVLQSDLYTLSSSVTVTSSTWPSQSITCNVAHPASSTKVDKKIEPRGPTIKPCPPCKCPAPNLEGGPSVFIFPPKIKDVLMISLSPIVTCVVVDVSEDDPDVQISWFVNNVEVHTAQTQTHREDYNSTLRVVSALPIQHQDWMSGKAFACAVNNKDLPAPIERTISKPKGSVRAPQVYVLPPPEEEMTKKQVTLTCMVTDFMPEDIYVEWTNNGKTELNYKNTEPVLDSDGSYFMYSKLRVEKKNWVERNSYSCSVVHEGLHNHHTTKSFSRTPGK

SEQ ID NO: 1517 - DNA, 990 bp, Artificial Sequence
  chemically synthesized
gccaagacaacagcccccagcgtgtaccctctggcccctgtgtgtggcgataccacaggcagctctgtgaccctgggctgcctcgtgaagggctacttccctgagccagtgaccctgacctggaacagcggctctctgtctagcggcgtgcacacctttccagccgtgctgcagagcgacctgtacaccctgagcagcagcgtgaccgtgaccagcagcacatggcccagccagagcatcacctgtaacgtggcccaccctgccagctccaccaaggtggacaagaagatcgagcccagaggccccaccatcaagccttgccccccttgcaaatgccctgcccccaatctggaaggcggccctagcgtgttcatcttcccacccaagatcaaggacgtgctgatgatcagcctgagccccatcgtgacctgcgtggtggtggacgtgtccgaggacgaccccgatgtgcagatcagttggttcgtgaacaacgtggaagtgcacaccgcccagacccagacacacagagaggactacaacagcaccctgagagtggtgtccgccctgcccatccagcaccaggattggatgagcggcaaggccttcgcctgcgctgtgaacaacaaggacctgccagcccccatcgagcggaccatctctaagcctaagggcagcgtgcgggctccccaggtgtacgtgctgcctcctccagaggaagagatgaccaagaaacaagtgacactgacatgcatggtcaccgacttcatgcccgaggacatctacgtggaatggaccaacaacggcaagaccgagctgaactacaagaacaccgagcccgtgctggacagcgacggcagctacttcatgtacagcaagctgcgggtggaaaagaaaaactgggtggaacggaacagctacagctgcagcgtggtgcacgagggcctgcacaatcaccacaccaccaagagcttcagccggacccctggaaaa

SEQ ID NO: 1518 - DNA, 18 bp, Artificial Sequence
  chemically synthesized
caaggccagtctggccaa

SEQ ID NO: 1519 - protein, 6 aa, Artificial Sequence
  chemically synthesized
GGSGGS

SEQ ID NO: 1520 - protein, 8 aa, Artificial Sequence
  chemically synthesized
LSGRSDNP

SEQ ID NO: 1521 - protein, 121 aa, Artificial Sequence
  chemically synthesized
EVQLVESGGGLVQPGGSLRLSCAASGFTFSDYGMHWVRQAPGKGLEWVAYISSGSYTIYSADSVKGRFTISRDNAKNTLYLQMSSLRAEDTAVYYCARRGYGSFYEYYFDYWGQGTTVTVS

SEQ ID NO: 1522 - protein, 106 aa, Artificial Sequence
  chemically synthesized
QIVLTQSPATLSLSPGERATLSCSASSSVSYMYWYQQKPGQAPRLLIYLTSNRATGIPARFSGSGSGTDYTLTISSLEPEDFAVYYCQQWSSNPFTFGQGTKLEIK

SEQ ID NO: 1523 - protein, 117 aa, Artificial Sequence
  chemically synthesized
EVQLVQSGAEVKKPGESLRISCKGSGYTFTTYWMHWVRQATGQGLEWMGNIYPGTGGSNFDEKFKNRVTITADKSTSTAYMELSSLRSEDTAVYYCTRWTTGTGAYWGQGTTVTVSS

SEQ ID NO: 1524 - protein, 117 aa, Artificial Sequence
  chemically synthesized
EVQLVQSGAEVKKPGESLRISCKGSGYTFTTYWMHWIRQSPSRGLEWLGNIYPGTGGSNFDEKFKNRFTISRDNSKNTLYLQMNSLRAEDTAVYYCTRWTTGTGAYWGQGTTVTVSS

SEQ ID NO: 1525 - protein, 117 aa, Artificial Sequence
  chemically synthesized
EVQLVQSGAEVKKPGESLRISCKGSGYTFTTYWMHWVRQAPGQGLEWMGNIYPGTGGSNFDEKFKNRFTISRDNSKNTLYLQMNSLRAEDTAVYYCTRWTTGTGAYWGQGTTVTVSS

SEQ ID NO: 1526 - protein, 113 aa, Artificial Sequence
  chemically synthesized
EIVLTQSPATLSLSPGERATLSCKSSQSLLDSGNQKNFLTWYQQKPGQAPRLLIYWASTRESGVPSRFSGSGSGTEFTLTISSLQPDDFATYYCQNDYSYPYTFGQGTKVEIK

SEQ ID NO: 1527 - protein, 113 aa, Artificial Sequence
  chemically synthesized
DIQMTQSPSSLSASVGDRVTITCKSSQSLLDSGNQKNFLTWYQQKPGQAPRLLIYWASTRESGIPPRFSGSGYGTDFTLTINNIESEDAAYYFCQNDYSYPYTFGQGTKVEIK

SEQ ID NO: 1528 - protein, 113 aa, Artificial Sequence
  chemically synthesized
EIVLTQSPATLSLSPGERATLSCKSSQSLLDSGNQKNFLTWYQQKPGKAPKLLIYWASTRESGVPSRFSGSGSGTDFTFTISSLQPEDIATYYCQNDYSYPYTFGQGTKVEIK

SEQ ID NO: 1529 - protein, 113 aa, Artificial Sequence
  chemically synthesized
DIVMTQTPLSLPVTPGEPASISCKSSQSLLDSGNQKNFLTWYQQKPGQAPRLLIYWASTRESGVPSRFSGSGSGTDFTFTISSLEAEDAATYYCQNDYSYPYTFGQGTKVEIK

SEQ ID NO: 1530 - protein, 113 aa, Artificial Sequence
  chemically synthesized
EIVLTQSPATLSLSPGERATLSCKSSQSLLDSGNQKNFLTWYQQKPGKAPKLLIYWASTRESGVPSRFSGSGSGTDFTFTISSLEAEDAATYYCQNDYSYPYTFGQGTKVEIK

SEQ ID NO: 1531 - protein, 113 aa, Artificial Sequence
  chemically synthesized
EIVLTQSPDFQSVTPKEKVTITCKSSQSLLDSGNQKNFLTWYQQKPGQAPRLLIYWASTRESGVPSRFSGSGSGTDFTFTISSLEAEDAATYYCQNDYSYPYTFGQGTKVEIK

SEQ ID NO: 1532 - protein, 113 aa, Artificial Sequence
  chemically synthesized
EIVLTQSPATLSLSPGERATLSCKSSQSLLDSGNQKNFLTWYQQKPGQAPRLLIYWASTRESGVPSRFSGSGSGTDFTFTISSLEAEDAATYYCQNDYSYPYTFGQGTKVEIK

SEQ ID NO: 1533 - protein, 113 aa, Artificial Sequence
  chemically synthesized
DIQMTQSPSSLSASVGDRVTITCKSSQSLLDSGNQKNFLTWYLQKPGQSPQLLIYWASTRESGVPSRFSGSGSGTDFTFTISSLEAEDAATYYCQNDYSYPYTFGQGTKVEIK

SEQ ID NO: 1534 - protein, 113 aa, Artificial Sequence
  chemically synthesized
DVVMTQSPLSLPVTLGQPASISCKSSQSLLDSGNQKNFLTWYQQKPGKAPKLLIYWASTRESGVPSRFSGSGSGTDFTFTISSLEAEDAATYYCQNDYSYPYTFGQGTKVEIK

SEQ ID NO: 1535 - protein, 444 aa, Artificial Sequence
  chemically synthesized
EVQLVQSGAEVKKPGESLRISCKGSGYTFTTYWMHWVRQATGQGLEWMGNIYPGTGGSNFDEKFKNRVTITADKSTSTAYMELSSLRSEDTAVYYCTRWTTGTGAYWGQGTTVTVSSASTKGPSVFPLAPCSRSTSESTAALGCLVKDYFPEPVTVSWNSGALTSGVHTFPAVLQSSGLYSLSSVVTVPSSSLGTKTYTCNVDHKPSNTKVDKRVESKYGPPCPPCPAPEFLGGPSVFLFPPKPKDTLMISRTPEVTCVVVDVSQEDPEVQFNWYVDGVEVHNAKTKPREEQFNSTYRVVSVLTVLHQDWLNGKEYKCKVSNKGLPSSIEKTISKAKGQPREPQVYTLPPSQEEMTKNQVSLTCLVKGFYPSDIAVEWESNGQPENNYKTTPPVLDSDGSFFLYSRLTVDKSRWQEGNVFSCSVMHEALHNHYTQKSLSLSLGK

SEQ ID NO: 1536 - protein, 444 aa, Artificial Sequence
  chemically synthesized
QVQLVQSGAEVKKPGASVKVSCKASGYTFTTYWMHWIRQSPSRGLEWLGNIYPGTGGSNFDEKFKNRFTISRDNSKNTLYLQMNSLRAEDTAVYYCTRWTTGTGAYWGQGTTVTVSSASTKGPSVFPLAPCSRSTSESTAALGCLVKDYFPEPVTVSWNSGALTSGVHTFPAVLQSSGLYSLSSVVTVPSSSLGTKTYTCNVDHKPSNTKVDKRVESKYGPPCPPCPAPEFLGGPSVFLFPPKPKDTLMISRTPEVTCVVVDVSQEDPEVQFNWYVDGVEVHNAKTKPREEQFNSTYRVVSVLTVLHQDWLNGKEYKCKVSNKGLPSSIEKTISKAKGQPREPQVYTLPPSQEEMTKNQVSLTCLVKGFYPSDIAVEWESNGQPENNYKTTPPVLDSDGSFFLYSRLTVDKSRWQEGNVFSCSVMHEALHNHYTQKSLSLSLGK

SEQ ID NO: 1537 - protein, 444 aa, Artificial Sequence
  chemically synthesized
EVQLVQSGAEVKKPGESLRISCKGSGYTFTTYWMHWIRQSPSRGLEWLGNIYPGTGGSNFDEKFKNRFTISRDNSKNTLYLQMNSLRAEDTAVYYCTRWTTGTGAYWGQGTTVTVSSASTKGPSVFPLAPCSRSTSESTAALGCLVKDYFPEPVTVSWNSGALTSGVHTFPAVLQSSGLYSLSSVVTVPSSSLGTKTYTCNVDHKPSNTKVDKRVESKYGPPCPPCPAPEFLGGPSVFLFPPKPKDTLMISRTPEVTCVVVDVSQEDPEVQFNWYVDGVEVHNAKTKPREEQFNSTYRVVSVLTVLHQDWLNGKEYKCKVSNKGLPSSIEKTISKAKGQPREPQVYTLPPSQEEMTKNQVSLTCLVKGFYPSDIAVEWESNGQPENNYKTTPPVLDSDGSFFLYSRLTVDKSRWQEGNVFSCSVMHEALHNHYTQKSLSLSLGK

SEQ ID NO: 1538 - protein, 444 aa, Artificial Sequence
  chemically synthesized
EVQLVQSGAEVKKPGESLRISCKGSGYTFTTYWMHWVRQAPGQGLEWMGNIYPGTGGSNFDEKFKNRFTISRDNSKNTLYLQMNSLRAEDTAVYYCTRWTTGTGAYWGQGTTVTVSSASTKGPSVFPLAPCSRSTSESTAALGCLVKDYFPEPVTVSWNSGALTSGVHTFPAVLQSSGLYSLSSVVTVPSSSLGTKTYTCNVDHKPSNTKVDKRVESKYGPPCPPCPAPEFLGGPSVFLFPPKPKDTLMISRTPEVTCVVVDVSQEDPEVQFNWYVDGVEVHNAKTKPREEQFNSTYRVVSVLTVLHQDWLNGKEYKCKVSNKGLPSSIEKTISKAKGQPREPQVYTLPPSQEEMTKNQVSLTCLVKGFYPSDIAVEWESNGQPENNYKTTPPVLDSDGSFFLYSRLTVDKSRWQEGNVFSCSVMHEALHNHYTQKSLSLSLGK

SEQ ID NO: 1539 - protein, 443 aa, Artificial Sequence
  chemically synthesized
EVQLVQSGAEVKKPGESLRISCKGSGYTFTTYWMHWVRQATGQGLEWMGNIYPGTGGSNFDEKFKNRVTITADKSTSTAYMELSSLRSEDTAVYYCTRWTTGTGAYWGQGTTVTVSSASTKGPSVFPLAPCSRSTSESTAALGCLVKDYFPEPVTVSWNSGALTSGVHTFPAVLQSSGLYSLSSVVTVPSSSLGTKTYTCNVDHKPSNTKVDKRVESKYGPPCPPCPAPEFLGGPSVFLFPPKPKDTLMISRTPEVTCVVVDVSQEDPEVQFNWYVDGVEVHNAKTKPREEQFNSTYRVVSVLTVLHQDWLNGKEYKCKVSNKGLPSSIEKTISKAKGQPREPQVYTLPPSQEEMTKNQVSLTCLVKGFYPSDIAVEWESNGQPENNYKTTPPVLDSDGSFFLYSRLTVDKSRWQEGNVFSCSVMHEALHNHYTQKSLSLSLG

SEQ ID NO: 1540 - protein, 443 aa, Artificial Sequence
  chemically synthesized
EVQLVQSGAEVKKPGESLRISCKGSGYTFTTYWMHWIRQSPSRGLEWLGNIYPGTGGSNFDEKFKNRFTISRDNSKNTLYLQMNSLRAEDTAVYYCTRWTTGTGAYWGQGTTVTVSSASTKGPSVFPLAPCSRSTSESTAALGCLVKDYFPEPVTVSWNSGALTSGVHTFPAVLQSSGLYSLSSVVTVPSSSLGTKTYTCNVDHKPSNTKVDKRVESKYGPPCPPCPAPEFLGGPSVFLFPPKPKDTLMISRTPEVTCVVVDVSQEDPEVQFNWYVDGVEVHNAKTKPREEQFNSTYRVVSVLTVLHQDWLNGKEYKCKVSNKGLPSSIEKTISKAKGQPREPQVYTLPPSQEEMTKNQVSLTCLVKGFYPSDIAVEWESNGQPENNYKTTPPVLDSDGSFFLYSRLTVDKSRWQEGNVFSCSVMHEALHNHYTQKSLSLSLG

SEQ ID NO: 1541 - protein, 220 aa, Artificial Sequence
  chemically synthesized
EIVLTQSPATLSLSPGERATLSCKSSQSLLDSGNQKNFLTWYQQKPGQAPRLLIYWASTRESGVPSRFSGSGSGTEFTLTISSLQPDDFATYYCQNDYSYPYTFGQGTKVEIKRTVAAPSVFIFPPSDEQLKSGTASVVCLLNNFYPREAKVQWKVDNALQSGNSQESVTEQDSKDSTYSLSSTLTLSKADYEKHKVYACEVTHQGLSSPVTKSFNRGEC

SEQ ID NO: 1542 - protein, 220 aa, Artificial Sequence
  chemically synthesized
DIQMTQSPSSLSASVGDRVTITCKSSQSLLDSGNQKNFLTWYQQKPGQAPRLLIYWASTRESGIPPRFSGSGYGTDFTLTINNIESEDAAYYFCQNDYSYPYTFGQGTKVEIKRTVAAPSVFIFPPSDEQLKSGTASVVCLLNNFYPREAKVQWKVDNALQSGNSQESVTEQDSKDSTYSLSSTLTLSKADYEKHKVYACEVTHQGLSSPVTKSFNRGEC

SEQ ID NO: 1543 - protein, 220 aa, Artificial Sequence
  chemically synthesized
EIVLTQSPATLSLSPGERATLSCKSSQSLLDSGNQKNFLTWYQQKPGKAPKLLIYWASTRESGVPSRFSGSGSGTDFTFTISSLQPEDIATYYCQNDYSYPYTFGQGTKVEIKRTVAAPSVFIFPPSDEQLKSGTASVVCLLNNFYPREAKVQWKVDNALQSGNSQESVTEQDSKDSTYSLSSTLTLSKADYEKHKVYACEVTHQGLSSPVTKSFNRGEC

SEQ ID NO: 1544 - protein, 220 aa, Artificial Sequence
  chemically synthesized
DIVMTQTPLSLPVTPGEPASISCKSSQSLLDSGNQKNFLTWYQQKPGQAPRLLIYWASTRESGVPSRFSGSGSGTDFTFTISSLEAEDAATYYCQNDYSYPYTFGQGTKVEIKRTVAAPSVFIFPPSDEQLKSGTASVVCLLNNFYPREAKVQWKVDNALQSGNSQESVTEQDSKDSTYSLSSTLTLSKADYEKHKVYACEVTHQGLSSPVTKSFNRGEC

SEQ ID NO: 1545 - protein, 220 aa, Artificial Sequence
  chemically synthesized
EIVLTQSPATLSLSPGERATLSCKSSQSLLDSGNQKNFLTWYQQKPGKAPKLLIYWASTRESGVPSRFSGSGSGTDFTFTISSLEAEDAATYYCQNDYSYPYTFGQGTKVEIKRTVAAPSVFIFPPSDEQLKSGTASVVCLLNNFYPREAKVQWKVDNALQSGNSQESVTEQDSKDSTYSLSSTLTLSKADYEKHKVYACEVTHQGLSSPVTKSFNRGEC

SEQ ID NO: 1546 - protein, 220 aa, Artificial Sequence
  chemically synthesized
EIVLTQSPDFQSVTPKEKVTITCKSSQSLLDSGNQKNFLTWYQQKPGQAPRLLIYWASTRESGVPSRFSGSGSGTDFTFTISSLEAEDAATYYCQNDYSYPYTFGQGTKVEIKRTVAAPSVFIFPPSDEQLKSGTASVVCLLNNFYPREAKVQWKVDNALQSGNSQESVTEQDSKDSTYSLSSTLTLSKADYEKHKVYACEVTHQGLSSPVTKSFNRGEC

SEQ ID NO: 1547 - protein, 220 aa, Artificial Sequence
  chemically synthesized
DIQMTQSPSSLSASVGDRVTITCKSSQSLLDSGNQKNFLTWYLQKPGQSPQLLIYWASTRESGVPSRFSGSGSGTDFTFTISSLEAEDAATYYCQNDYSYPYTFGQGTKVEIKRTVAAPSVFIFPPSDEQLKSGTASVVCLLNNFYPREAKVQWKVDNALQSGNSQESVTEQDSKDSTYSLSSTLTLSKADYEKHKVYACEVTHQGLSSPVTKSFNRGEC

SEQ ID NO: 1548 - protein, 220 aa, Artificial Sequence
  chemically synthesized
DVVMTQSPLSLPVTLGQPASISCKSSQSLLDSGNQKNFLTWYQQKPGKAPKLLIYWASTRESGVPSRFSGSGSGTDFTFTISSLEAEDAATYYCQNDYSYPYTFGQGTKVEIKRTVAAPSVFIFPPSDEQLKSGTASVVCLLNNFYPREAKVQWKVDNALQSGNSQESVTEQDSKDSTYSLSSTLTLSKADYEKHKVYACEVTHQGLSSPVTKSFNRGEC

SEQ ID NO: 1549 - protein, 121 aa, Artificial Sequence
  chemically synthesized
EVQLLESGGGLVQPGGSLRLSCSASGFTFSSYTMNWVRQAPGKGLEWVSGISDTGGNTYYTDSVKGRFTVSRDNSKNTLSLQMNSLRAEDTAVYYCAKDQGGSYPYYFHYWGQGSLVTVSS

SEQ ID NO: 1550 - protein, 122 aa, Artificial Sequence
  chemically synthesized
EVQLVESGGGLVQPGGSLRLSCAASGFTVSNNYMSWVRQAPGKGLEWVSVIYSGGFTYYTDSVKGRFTISRHNSKNTLYLQMNSLRAEDTAVYYCARYYYDTSDYWTFFDYWGQGTLVTVSS

SEQ ID NO: 1551 - protein, 119 aa, Artificial Sequence
  chemically synthesized
QVQLVESGGGVVQSGRSLRLSCAASGFTFSSYGMHWVRQAPGKGLEWVAVIWYDGSNIYYSDSVKGRFTISRANSKNTLYLQMNSLRAEDTAVYYCARPGHWNYFFEYWGQGTLVTVSS

SEQ ID NO: 1552 - protein, 122 aa, Artificial Sequence
  chemically synthesized
EVQLVESGGGLVQPGGSLRLSCGASGFTFRNYDMHWVRQITGKGLEWVSAIGSAGDTYYPDSVKGRFTISRENAKNSLYLQMNSLRVGDTAVYYCTRDIHCSSTRCYGMDVWGQGTTVTVSS

SEQ ID NO: 1553 - protein, 130 aa, Artificial Sequence
  chemically synthesized
EVQLVESGGGLVKPGGSLRLSCAASGFKFSNEWMSWVRQAPGKGLEWVGRIKSKTDGGTTDYAAPVKGRFTISRDDSKNTLYLQMNSLKTEDTAVYYCTTDQDFWSGYYTGADYYGMDVWGQGTMVTVSS

SEQ ID NO: 1554 - protein, 116 aa, Artificial Sequence
  chemically synthesized
QMQLQQWGAGLLKPSETLSLTCVVYGGSLNGYYWSWIRQSPGKGLEWIGEIDHSGSTNYNPSLKNRVTMSVDTSKIQFSLKLTSVTVADTAVYYCAREGLLPFDYWGQGTLVTVSS

SEQ ID NO: 1555 - protein, 123 aa, Artificial Sequence
  chemically synthesized
QLQLQESGPDLVKPSDTLSLTCTVSDDSISSTTYYWAWIRQPPGKGLEWIGSMSYNGNNYYNPSLKSRVAISAGTSQKQFSLKLTSVTAADTAVYHCARHLGYNGNWYPFDFWGQGILVTVSS

SEQ ID NO: 1556 - protein, 122 aa, Artificial Sequence
  chemically synthesized
EVQVVESGGGLVEPGRSLRLSCKASGFTFDDYAMHWVRQTPGKALEWVSGINWSGNNIGYADSVKGRFTISKDDAKNSLYLQMNSLRPEDTALYYCTKDISITGTLDAFDVWGQGTMVTVSS

SEQ ID NO: 1557 - protein, 115 aa, Artificial Sequence
  chemically synthesized
QVQLVESGGGVVQPGRSLRLSCAASGFTFSSYGMHWVRQAPGKGLEWVAIIWSDGDSEYNLDSVKGRFTISRDNSKNTLYLQMNSLRVEDSAVYYCARDRDLEDIWGQGTMVTSS

SEQ ID NO: 1558 - protein, 117 aa, Artificial Sequence [sequence omitted]

SEQ ID NO: 1559 - protein, 121 aa, Artificial Sequence
  chemically synthesized
EVQLVESGGGVVRPGGSLRLSCAASGFTFDDYGMSWVRQVPGKGLEWVSGISWNDGKTVYAESVKGRFIISRDNAKNSLYLEMNSLRAEDTALYYCARDWQYLIERYFDYWGQGTLVTVSS

SEQ ID NO: 1560 - protein, 121 aa, Artificial Sequence
  chemically synthesized
EVQLVESGGGVVRPGGSLRLSCTASGFTFDDYGMSWVRQAPGKGLEWISGIGWTGGRSSYADSVRGRFTISRDNAKNSLYLQMNSLGAEDTALYYCARDRQWLVQWYFDYWGQGTLVTVSS

SEQ ID NO: 1561 - protein, 121 aa, Artificial Sequence
  chemically synthesized
EVQLVESGGRVVRPGGSLRLSCAASGFTFDDYGMSWVRQLPGKGLEWVAGISWNDGKTVYAESVKGRFIISRDNAKNSLHLEMNSLRAEDTALYYCARDWQYLIDRYFDFWGQGTLVTVSS

SEQ ID NO: 1562 - protein, 121 aa, Artificial Sequence
  chemically synthesized
EVQLVESGGGLVQPGGSLRLSCAASGFTFDDYAMHWVRQAPGKGLEWVSGIGWSSGSIGYADSVKGRFTISRDNAKNSLYLQMDSLRPEDSALYYCAKAYTFMITLYFDYWGQGTLVTVSS

SEQ ID NO: 1563 - protein, 121 aa, Artificial Sequence
  chemically synthesized
EVQLVESGGGLVQPGRSLRLSCAASGFTFDDYDMHWVRQAPGKGLEWVSGSGWNRGSLGYADSVKGRFTISRDNAKKSLYLQMNSVRVEDTALYYCAKGFVVVSAAYFDYWGQGTLVTVSS

SEQ ID NO: 1564 - protein, 121 aa, Artificial Sequence
  chemically synthesized
QVQLVQSGAEVKRPGSSVKVSCKVSGVTFRNFAIIWVRQAPGQGLEWMGGIIPFFSAANYAQSFQGRVTITPDESTSTAFMELASLRSEDTAVYYCAREGERGHTYGFDYWGQGTLVTVSS

SEQ ID NO: 1565 - protein, 121 aa, Artificial Sequence
  chemically synthesized
EVQLVESGGGLVQSGRSLRLSCAASGFTFDDYAMHWVRQPPGKGLEWVSGINWNRGRTGYADSVKGRFTISRDNAKNSLYLQMNDLRVEDTALYYCAKAEQWLDEGYFDYWGQGTLVTVSS

SEQ ID NO: 1566 - protein, 121 aa, Artificial Sequence
  chemically synthesized
EVQLVESGGGLVQRGGSLRLSCAASGFSFSSYAMNWVRQAPGKGLEWVSTISDSGGSTYYADSVKGRFTISRDNSKNTLSLQMNSLRAEDTAVYYCAKDQGGSYPYYFHYWGQGTLVTVSS

SEQ ID NO: 1567 - protein, 121 aa, Artificial Sequence
  chemically synthesized
EVQLVESGGGLVQPGRSLRLSCAASGFTFEDYAMHWVRQAPGKGLEWVSGIGWSNVKIGYADSVKGRFTISRDNVRNSLYLQMNSLRTEDTAFYYCVKAYTSMLTLYFDYWGQGTLVTVSS

SEQ ID NO: 1568 - protein, 117 aa, Artificial Sequence
  chemically synthesized
QVQLVQSGAEVKRPGASVKVSCKASGYTFTSFYMYWVRQAPGQGLEWMGIINPSDGSTSNAQKFQGRVTMTRDTSTSTVYMELSSLRSEDTAVYYCARRVAGDIFDIWGQGTMTVSS

SEQ ID NO: 1569 - protein, 119 aa, Artificial Sequence
  chemically synthesized
QVQLQESGPGLVKPSETLSLTCTVSGGSISSYHWNWIRQSPGKGLEWIGYIYYIGSTDYNPSLESRVTISVDTSKNQFSLKLSSVTAADTAVYYCARVPVGATGASDVWGQGTMVTVSS

SEQ ID NO: 1570 - protein, 121 aa, Artificial Sequence
  chemically synthesized
EVQLVESGGSVVRPGGSLRLSCVVSGFTFEDYGLSWVRQIPGKGLEWVSGISWTGGNTGYADSVKGRFTISRDNAKNSLYLQMNSLRAEDTALYHCTRDRQWLMQWYFDYWGQGTLVTVSS

SEQ ID NO: 1571 - protein, 119 aa, Artificial Sequence
  chemically synthesized
QVQLVESGGGVVQPGRSLRLSCSASGFTFSAYAMHWVRQAPGKGLEWVAAISYGGSDKYYADSVKGRFTISRDNSKNTLYLQMNSLRTDDTAVYYCAKSAHWNFFFDYWGQGTLVTVSS

SEQ ID NO: 1572 - protein, 121 aa, Artificial Sequence
  chemically synthesized
EVQLVESGGGLVQPGRSLRLSCVASGFALHDYAMHWVRQVPGKGLEWVSSISWNSGVIGYADSLKGRFTISRDNAKNSLYLQMNSLRAEDTALYYCAKGSGSYYVSWFDPWGQGTLVTVSS

SEQ ID NO: 1573 - protein, 123 aa, Artificial Sequence
  chemically synthesized
QLQLQESGPGLVQPSETLSLTCTVSGDSISSTAYHWDWIRQPPGKGLEWIGTITYNGNTYFNPSLKSRVTISVDTSKNQFSLKLLSMTAAETAVFYCARHLGYNSDFFPFDFWGQGTLVTVSS

SEQ ID NO: 1574 - protein, 119 aa, Artificial Sequence
  chemically synthesized
EVQLVESGGGLVRPGGSLRLSCAASGFTFSTYAMAWVRQTPGKGLEGVSAIGGSGDSTYYVDSVKGRFTISRDNSKSTLFLQMNSLRAEDTAVYYCVKVRNYDGSFDIWGQGTMVTVSS

SEQ ID NO: 1575 - protein, 108 aa, Artificial Sequence
  chemically synthesized
DIQMTQSPSSLSASVGDRVTITCRASQSISSYLIWYQQKPGTAPKFLIYAASSLQSGVPSRFSGCGSGTDFTLTISSLQPEDFATYYCQQSYSTPPITFGQGTRLEIK

SEQ ID NO: 1576 - protein, 107 aa, Artificial Sequence
  chemically synthesized
EIVMTQSPATLSVSPGERATLSCRASQSVSSNLAWYQQKPGQAPRLLIYGASTRATGIPARFSGSGSGTEFTLTISSLQSGDFAVYYCQQYNNWPLTFGGGTKVEIN

SEQ ID NO: 1577 - protein, 107 aa, Artificial Sequence; identical to SEQ ID NO: 1576
  chemically synthesized

SEQ ID NO: 1578 - protein, 108 aa, Artificial Sequence
  chemically synthesized
DIQMTQSPSSLSASVGDRVTITCRASQSINNYLNWYQQKPGKAPKLLIYTASSLQSGVPSRFSGSGSGTDFTLTISSLQPEDFATYYCQQSYSTPPLTFGQGTQLEIK

SEQ ID NO: 1579 - protein, 108 aa, Artificial Sequence
  chemically synthesized
DIQMTQSPSSLSASVGDRVTITCRASQSISNYLNWYQQKPGKAPKLLIYAASSLQSGVPSRFSGSGSGTDFTLTISSLQPEDFATYYCQQSYSTPPITFGQGTRLEIK

SEQ ID NO: 1580 - protein, 108 aa, Artificial Sequence
  chemically synthesized
DIQMTQSPSSLSASVGDRVTITCRASQSISSYLNWYQQKPGKAPKLLIYAASSLQSGVPSRFSGSGSGTDFTLTISSLQPEDFATYYCQQSYSTPPITFGQGTRLEIK

SEQ ID NO: 1581 - protein, 108 aa, Artificial Sequence
  chemically synthesized
EIVLTQSPGTLSLSPGERVTLSCRASQSVYSNYLAWYQQNPGQAPRLLIYAASNRATGIPDRFSGSGSGTDFTLTISRLEPEDFAVYYCHQYATSPWTFGQGTKVEIK

SEQ ID NO: 1582 - protein, 108 aa, Artificial Sequence
  chemically synthesized
EIVLTQSPGTLSLSPGERATLSCRASQSVSSSYLAWYQQKPGQAPRLLIYGASSRTTGIPDRFSGSGSGTDFTLTISRLEPEDFAVYYCQQYGSSPWTFGQGTKVEIK

SEQ ID NO: 1583 - protein, 107 aa, Artificial Sequence
  chemically synthesized
DIQMTQSPISVSASVGDRVTITCRASQGISNWLAWYQQKPGIAPKLLIYSASSLQSGVPSRFRGSGSGTDFTLTIGSLQPEDFATYYCQQAHSFPLTFGGGTKVEIK

SEQ ID NO: 1584 - protein, 107 aa, Artificial Sequence
  chemically synthesized
DIQMTQSPSSLSASVGDRVTITCRASQGIRNDLGWYQQKPGKAPKRLIYAASNLQSGVPSRFSGSGSGTEFTLTISSLQPEDFATYYCLQHNSYPLTFGGGTKVEIK

SEQ ID NO: 1585 - protein, 107 aa, Artificial Sequence [sequence omitted]

SEQ ID NO: 1586 - protein, 108 aa, Artificial Sequence
  chemically synthesized
EIVLTQSPGTLSLSPGERATLSCRASQSVSSSYLAWYQQKPGQAPRLLIYGASSRATGIPDRFSGSGSGTDFTLTISRLEPEDFAVYYCQQYGSSPWTFGQGTKVEIK

SEQ ID NO: 1587 - protein, 108 aa, Artificial Sequence; identical to SEQ ID NO: 1580
  chemically synthesized

SEQ ID NO: 1588 - protein, 444 aa, Artificial Sequence
  chemically synthesized
EVQLLESGGVLVQPGGSLRLSCAASGFTFSNFGMTWVRQAPGKGLEWVSGISGGGRDTYFADSVKGRFTISRDNSKNTLYLQMNSLKGEDTAVYYCVKWGNIYFDYWGQGTLVTVSSASTKGPSVFPLAPCSRSTSESTAALGCLVKDYFPEPVTVSWNSGALTSGVHTFPAVLQSSGLYSLSSVVTVPSSSLGTKTYTCNVDHKPSNTKVDKRVESKYGPPCPPCPAPEFLGGPSVFLFPPKPKDTLMISRTPEVTCVVVDVSQEDPEVQFNWYVDGVEVHNAKTKPREEQFNSTYRVVSVLTVLHQDWLNGKEYKCKVSNKGLPSSIEKTISKAKGQPREPQVYTLPPSQEEMTKNQVSLTCLVKGFYPSDIAVEWESNGQPENNYKTTPPVLDSDGSFFLYSRLTVDKSRWQEGNVFSCSVMHEALHNHYTQKSLSLSLGK

SEQ ID NO: 1589 - protein, 449 aa, Artificial Sequence
  chemically synthesized
EVQVVESGGGLVEPGRSLRLSCKASGFTFDDYAMHWVRQTPGKALEWVSGISWSGNNIGYADSVKGRFTISKDDAKNSLYLQMNSLRPEDTALYYCTKDISITGTLDAFDVWGQGTMVTVSSASTKGPSVFPLAPCSRSTSESTAALGCLVKDYFPEPVTVSWNSGALTSGVHTFPAVLQSSGLYSLSSVVTVPSSSLGTKTYTCNVDHKPSNTKVDKRVESKYGPPCPPCPAPEFLGGPSVFLFPPKPKDTLMISRTPEVTCVVVDVSQEDPEVQFNWYVDGVEVHNAKTKPREEQFNSTYRVVSVLTVLHQDWLNGKEYKCKVSNKGLPSSIEKTISKAKGQPREPQVYTLPPSQEEMTKNQVSLTCLVKGFYPSDIAVEWESNGQPENNYKTTPPVLDSDGSFFLYSRLTVDKSRWQEGNVFSCSVMHEALHNHYTQKSLSLSLGK

SEQ ID NO: 1590 - protein, 446 aa, Artificial Sequence
  chemically synthesized
EVQLVESGGGLVRPGGSLRLSCAASGFTFSTYAMAWVRQTPGKGLEGVSAIGGSGDSTYYVDSVKGRFTISRDNSKSTLFLQMNSLRAEDTAVYYCVKVRNYDGSFDIWGQGTMVTVSSASTKGPSVFPLAPCSRSTSESTAALGCLVKDYFPEPVTVSWNSGALTSGVHTFPAVLQSSGLYSLSSVVTVPSSSLGTKTYTCNVDHKPSNTKVDKRVESKYGPPCPPCPAPEFLGGPSVFLFPPKPKDTLMISRTPEVTCVVVDVSQEDPEVQFNWYVDGVEVHNAKTKPREEQFNSTYRVVSVLTVLHQDWLNGKEYKCKVSNKGLPSSIEKTISKAKGQPREPQVYTLPPSQEEMTKNQVSLTCLVKGFYPSDIAVEWESNGQPENNYKTTPPVLDSDGSFFLYSRLTVDKSRWQEGNVFSCSVMHEALHNHYTQKSLSLSLGK

SEQ ID NO: 1591 - protein, 448 aa, Artificial Sequence
  chemically synthesized
QVQLVQSGAEVKRPGSSVKVSCKVSGVTFRNFAIIWVRQAPGQGLEWMGGIIPFFSAANYAQSFQGRVTITPDESTSTAFMELASLRSEDTAVYYCAREGERGHTYGFDYWGQGTLVTVSSASTKGPSVFPLAPCSRSTSESTAALGCLVKDYFPEPVTVSWNSGALTSGVHTFPAVLQSSGLYSLSSVVTVPSSSLGTKTYTCNVDHKPSNTKVDKRVESKYGPPCPPCPAPEFLGGPSVFLFPPKPKDTLMISRTPEVTCVVVDVSQEDPEVQFNWYVDGVEVHNAKTKPREEQFNSTYRVVSVLTVLHQDWLNGKEYKCKVSNKGLPSSIEKTISKAKGQPREPQVYTLPPSQEEMTKNQVSLTCLVKGFYPSDIAVEWESNGQPENNYKTTPPVLDSDGSFFLYSRLTVDKSRWQEGNVFSCSVMHEALHNHYTQKSLSLSLGK

SEQ ID NO: 1592 - protein, 214 aa, Artificial Sequence
  chemically synthesized
DIQMTQSPSSLSASVGDSITITCRASLSINTFLNWYQQKPGKAPNLLIYAASSLHGGVPSRFSGSGSGTDFTLTIRTLQPEDFATYYCQQSSNTPFTFGPGTVVDFRRTVAAPSVFIFPPSDEQLKSGTASVVCLLNNFYPREAKVQWKVDNALQSGNSQESVTEQDSKDSTYSLSSTLTLSKADYEKHKVYACEVTHQGLSSPVTKSFNRGEC

SEQ ID NO: 1593 - protein, 214 aa, Artificial Sequence
  chemically synthesized
DIQMTQSPISVSASVGDRVTITCRASQGISNWLAWYQQKPGIAPKLLIYSASSLQSGVPSRFRGSGSGTDFTLTIGSLQPEDFATYYCQQAHSFPLTFGGGTKVEIKRTVAAPSVFIFPPSDEQLKSGTASVVCLLNNFYPREAKVQWKVDNALQSGNSQESVTEQDSKDSTYSLSSTLTLSKADYEKHKVYACEVTHQGLSSPVTKSFNRGEC

SEQ ID NO: 1594 - protein, 215 aa, Artificial Sequence
  chemically synthesized
EIVLTQSPGTLSLSPGERATLSCRASQSVSSSYLAWYQQKPGQAPRLLIYGASSRATGIPDRFSGSGSGTDFTLTISRLEPEDFAVYYCQQYGSSPWTFGQGTKVEIKRTVAAPSVFIFPPSDEQLKSGTASVVCLLNNFYPREAKVQWKVDNALQSGNSQESVTEQDSKDSTYSLSSTLTLSKADYEKHKVYACEVTHQGLSSPVTKSFNRGEC

SEQ ID NO: 1595 - protein, 215 aa, Artificial Sequence
  chemically synthesized
DIQMTQSPSSLSASVGDRVTITCRASQSISSYLNWYQQKPGKAPKLLIYAASSLQSGVPSRFSGSGSGTDFTLTISSLQPEDFATYYCQQSYSTPPITFGQGTRLEIKRTVAAPSVFIFPPSDEQLKSGTASVVCLLNNFYPREAKVQWKVDNALQSGNSQESVTEQDSKDSTYSLSSTLTLSKADYEKHKVYACEVTHQGLSSPVTKSFNRGEC

SEQ ID NO: 1596 - protein, 16 aa, Artificial Sequence
  chemically synthesized
GVNPSNGGTNFSEKFK

SEQ ID NO: 1597 - protein, 6 aa, Artificial Sequence
  chemically synthesized
YPGTGG

SEQ ID NO: 1598 - protein, 8 aa, Artificial Sequence
  chemically synthesized
WTTGTGAY

SEQ ID NO: 1599 - protein, 13 aa, Artificial Sequence
  chemically synthesized
SQSLLDSGNQKNF

SEQ ID NO: 1600 - protein, 3 aa, Artificial Sequence
  chemically synthesized
WAS

SEQ ID NO: 1601 - protein, 6 aa, Artificial Sequence
  chemically synthesized
DYSYPY

SEQ ID NO: 1602 - protein, 5 aa, Artificial Sequence
  chemically synthesized
TYWMH

SEQ ID NO: 1603 - protein, 16 aa, Artificial Sequence
  chemically synthesized
NIYPGTGGSNFDEKFK

SEQ ID NO: 1604 - protein, 7 aa, Artificial Sequence
  chemically synthesized
WASTRES

SEQ ID NO: 1605 - protein, 9 aa, Artificial Sequence
  chemically synthesized
QNDYSYPYT

SEQ ID NO: 1606 - protein, 10 aa, Artificial Sequence
  chemically synthesized
GYTFTTYWMH

SEQ ID NO: 1607 - protein, 8 aa, Artificial Sequence
  chemically synthesized
GFTFSSYT

SEQ ID NO: 1608 - protein, 8 aa, Artificial Sequence
  chemically synthesized
ISDTGGNT

SEQ ID NO: 1609 - protein, 14 aa, Artificial Sequence
  chemically synthesized
AKDQGGSYPYYFHY

SEQ ID NO: 1610 - protein, 6 aa, Artificial Sequence
  chemically synthesized
QSISSY

SEQ ID NO: 1611 - protein, 3 aa, Artificial Sequence
  chemically synthesized
AAS

SEQ ID NO: 1612 - protein, 10 aa, Artificial Sequence
  chemically synthesized
QQSYSTPPIT

SEQ ID NO: 1613 - protein, 8 aa, Artificial Sequence
  chemically synthesized
GFTVSNNY

SEQ ID NO: 1614 - protein, 7 aa, Artificial Sequence
  chemically synthesized
IYSGGFT

SEQ ID NO: 1615 - protein, 16 aa, Artificial Sequence
  chemically synthesized
ARYYYDTSDYWTFFDY

SEQ ID NO: 1616 - protein, 6 aa, Artificial Sequence
  chemically synthesized
QSVSSN

SEQ ID NO: 1617 - protein, 3 aa, Artificial Sequence
  chemically synthesized
GAS

SEQ ID NO: 1618 - protein, 9 aa, Artificial Sequence
  chemically synthesized
QQYNNWPLT

SEQ ID NO: 1619 - protein, 8 aa, Artificial Sequence
  chemically synthesized
GFTFSSYG

SEQ ID NO: 1620 - protein, 8 aa, Artificial Sequence
  chemically synthesized
IWYDGSNI

SEQ ID NO: 1621 - protein, 12 aa, Artificial Sequence
  chemically synthesized
ARPGHWNYFFEY

SEQ ID NO: 1622 - protein, 6 aa, Artificial Sequence
  chemically synthesized
QSINNY

SEQ ID NO: 1623 - protein, 3 aa, Artificial Sequence
  chemically synthesized
TAS

SEQ ID NO: 1624 - protein, 10 aa, Artificial Sequence
  chemically synthesized
QQSYSTPPLT

SEQ ID NO: 1625 - protein, 8 aa, Artificial Sequence
  chemically synthesized
GFTFRNYD

SEQ ID NO: 1626 - protein, 7 aa, Artificial Sequence
  chemically synthesized
IGSAGDT

SEQ ID NO: 1627 - protein, 16 aa, Artificial Sequence
  chemically synthesized
TRDIHCSSTRCYGMDV

SEQ ID NO: 1628 - protein, 6 aa, Artificial Sequence
  chemically synthesized
QSISNY

SEQ ID NO: 1629 - protein, 8 aa, Artificial Sequence
  chemically synthesized
GFKFSNEW

SEQ ID NO: 1630 - protein, 10 aa, Artificial Sequence
  chemically synthesized
IKSKTDGGTT

SEQ ID NO: 1631 - protein, 21 aa, Artificial Sequence
  chemically synthesized
TTDQDFWSGYYTGADYYGMDV

SEQ ID NO: 1632 - protein, 8 aa, Artificial Sequence
  chemically synthesized
GGSLNGYY

SEQ ID NO: 1633 - protein, 7 aa, Artificial Sequence
  chemically synthesized
IDHSGST

SEQ ID NO: 1634 - protein, 10 aa, Artificial Sequence
  chemically synthesized
AREGLLPFDY

SEQ ID NO: 1635 - protein, 7 aa, Artificial Sequence
  chemically synthesized
QSVYSNY

SEQ ID NO: 1636 - protein, 9 aa, Artificial Sequence
  chemically synthesized
HQYATSPWT

SEQ ID NO: 1637 - protein, 10 aa, Artificial Sequence
  chemically synthesized
DDSISSTTYY

SEQ ID NO: 1638 - protein, 15 aa, Artificial Sequence
  chemically synthesized
ARHLGYNGNWYPFDF

SEQ ID NO: 1639 - protein, 7 aa, Artificial Sequence
  chemically synthesized
QSVSSSY

SEQ ID NO: 1640 - protein, 3 aa, Artificial Sequence
  chemically synthesized
GAS

SEQ ID NO: 1641 - protein, 9 aa, Artificial Sequence
  chemically synthesized
QQYGSSPWT

SEQ ID NO: 1642 - protein, 8 aa, Artificial Sequence
  chemically synthesized
GFTFDDYA

SEQ ID NO: 1643 - protein, 8 aa, Artificial Sequence
  chemically synthesized
INWSGNNI

SEQ ID NO: 1644 - protein, 15 aa, Artificial Sequence
  chemically synthesized
TKDISITGTLDAFDV

SEQ ID NO: 1645 - protein, 6 aa, Artificial Sequence
  chemically synthesized
QGISNW

SEQ ID NO: 1646 - protein, 3 aa, Artificial Sequence
  chemically synthesized
SAS

SEQ ID NO: 1647 - protein, 9 aa, Artificial Sequence
  chemically synthesized
QQAHSFPLT

SEQ ID NO: 1648 - protein, 8 aa, Artificial Sequence
  chemically synthesized
IWSDGDSE

SEQ ID NO: 1649 - protein, 9 aa, Artificial Sequence
  chemically synthesized
ARDRDLEDI

SEQ ID NO: 1650 - protein, 6 aa, Artificial Sequence
  chemically synthesized
QGIRND

SEQ ID NO: 1651 - protein, 9 aa, Artificial Sequence
  chemically synthesized
LQHNSYPLT

SEQ ID NO: 1652 - protein, 8 aa, Artificial Sequence
  chemically synthesized
GFTFSNFG

SEQ ID NO: 1653 - protein, 8 aa, Artificial Sequence
  chemically synthesized
ISGGGRDT

SEQ ID NO: 1654 - protein, 10 aa, Artificial Sequence
  chemically synthesized
VKWGNIYFDY

SEQ ID NO: 1655 - protein, 6 aa, Artificial Sequence
  chemically synthesized
LSINTF

SEQ ID NO: 1656 - protein, 9 aa, Artificial Sequence
  chemically synthesized
QQSSNTPFT

SEQ ID NO: 1657 - protein, 8 aa, Artificial Sequence
  chemically synthesized
GFTFDDYG

SEQ ID NO: 1658 - protein, 8 aa, Artificial Sequence
  chemically synthesized
ISWNDGKT

SEQ ID NO: 1659 - protein, 14 aa, Artificial Sequence
  chemically synthesized
ARDWQYLIERYFDY

SEQ ID NO: 1660 - protein, 8 aa, Artificial Sequence
  chemically synthesized
IGWTGGRS

SEQ ID NO: 1661 - protein, 14 aa, Artificial Sequence
  chemically synthesized
ARDRQWLVQWYFDY

SEQ ID NO: 1662 - protein, 14 aa, Artificial Sequence
  chemically synthesized
ARDWQYLIDRYFDF

SEQ ID NO: 1663 - protein, 8 aa, Artificial Sequence
  chemically synthesized
IGWSSGSI

SEQ ID NO: 1664 - protein, 14 aa, Artificial Sequence
  chemically synthesized
AKAYTFMITLYFDY

SEQ ID NO: 1665 - protein, 8 aa, Artificial Sequence
  chemically synthesized
GFTFDDYD

SEQ ID NO: 1666 - protein, 8 aa, Artificial Sequence
  chemically synthesized
SGWNRGSL

SEQ ID NO: 1667 - protein, 14 aa, Artificial Sequence
  chemically synthesized
AKGFVVVSAAYFDY

SEQ ID NO: 1668 - protein, 8 aa, Artificial Sequence
  chemically synthesized
GVTFRNFA

SEQ ID NO: 1669 - protein, 8 aa, Artificial Sequence
  chemically synthesized
IIPFFSAA

SEQ ID NO: 1670 - protein, 14 aa, Artificial Sequence
  chemically synthesized
AREGERGHTYGFDY

SEQ ID NO: 1671 - protein, 8 aa, Artificial Sequence
  chemically synthesized
INWNRGRT

SEQ ID NO: 1672 - protein, 14 aa, Artificial Sequence
  chemically synthesized
AKAEQWLDEGYFDY

SEQ ID NO: 1673 - protein, 8 aa, Artificial Sequence
  chemically synthesized
GFTFEDYA

SEQ ID NO: 1674 - protein, 8 aa, Artificial Sequence
  chemically synthesized
ISDSGGST

SEQ ID NO: 1675 - protein, 8 aa, Artificial Sequence
  chemically synthesized
GYTFTSFY

SEQ ID NO: 1676 - protein, 8 aa, Artificial Sequence
  chemically synthesized
IGWSNVKI

SEQ ID NO: 1677 - protein, 14 aa, Artificial Sequence
  chemically synthesized
VKAYTSMLTLYFDY

SEQ ID NO: 1678 - protein, 8 aa, Artificial Sequence
  chemically synthesized
GGSISSYH

SEQ ID NO: 1679 - protein, 8 aa, Artificial Sequence
  chemically synthesized
INPSDGST

SEQ ID NO: 1680 - protein, 11 aa, Artificial Sequence
  chemically synthesized
ARRVAGDIFDI

SEQ ID NO: 1681 - protein, 8 aa, Artificial Sequence
  chemically synthesized
GFTFEDYG

SEQ ID NO: 1682 - protein, 7 aa, Artificial Sequence
  chemically synthesized
IYYIGST

SEQ ID NO: 1683 - protein, 13 aa, Artificial Sequence
  chemically synthesized
ARVPVGATGASDV

SEQ ID NO: 1684 - protein, 8 aa, Artificial Sequence
  chemically synthesized
GFTFSAYA

SEQ ID NO: 1685 - protein, 8 aa, Artificial Sequence
  chemically synthesized
ISWTGGNT

SEQ ID NO: 1686 - protein, 14 aa, Artificial Sequence
  chemically synthesized
TRDRQWLMQWYFDY

SEQ ID NO: 1687 - protein, 8 aa, Artificial Sequence
  chemically synthesized
GFALHDYA

SEQ ID NO: 1688 - protein, 8 aa, Artificial Sequence
  chemically synthesized
ISYGGSDK

SEQ ID NO: 1689 - protein, 12 aa, Artificial Sequence
  chemically synthesized
AKSAHWNFFFDY

SEQ ID NO: 1690 - protein, 8 aa, Artificial Sequence
  chemically synthesized
GFTFSTYA

SEQ ID NO: 1691 - protein, 7 aa, Artificial Sequence
  chemically synthesized
ITYNGNT

SEQ ID NO: 1692 - protein, 15 aa, Artificial Sequence
  chemically synthesized
ARHLGYNSDFFPFDF

SEQ ID NO: 1693 - protein, 8 aa, Artificial Sequence
  chemically synthesized
IGGSGDST

SEQ ID NO: 1694 - protein, 12 aa, Artificial Sequence
  chemically synthesized
VKVRNYDGSFDI

SEQ ID NO: 1695 - protein, 8 aa, Artificial Sequence
  chemically synthesized
LSGRSANP

SEQ ID NO: 1696 - protein, 8 aa, Artificial Sequence
  chemically synthesized
LSGRSANI

SEQ ID NO: 1697 - protein, 8 aa, Artificial Sequence
  chemically synthesized
LSGRSDNI

SEQ ID NO: 1698 - protein, 8 aa, Artificial Sequence
  chemically synthesized
MIAPVAYR

SEQ ID NO: 1699 - protein, 8 aa, Artificial Sequence
  chemically synthesized
RPSPMWAY

SEQ ID NO: 1700 - protein, 8 aa, Artificial Sequence
  chemically synthesized
WATPRPMR

SEQ ID NO: 1701 - protein, 8 aa, Artificial Sequence
  chemically synthesized
FRLLDWQW

SEQ ID NO: 1702 - protein, 5 aa, Artificial Sequence
  chemically synthesized
ISSGL

SEQ ID NO: 1703 - protein, 7 aa, Artificial Sequence
  chemically synthesized
ISSGLLS

SEQ ID NO: 1704 - protein, 6 aa, Artificial Sequence
  chemically synthesized
ISSGLL

SEQ ID NO: 1705 - protein, 8 aa, Artificial Sequence
  chemically synthesized
GITFSNSG

SEQ ID NO: 1706 - protein, 8 aa, Artificial Sequence
  chemically synthesized
IWYDGSKR

SEQ ID NO: 1707 - protein, 5 aa, Artificial Sequence
  chemically synthesized
TNDDY

SEQ ID NO: 1708 - protein, 6 aa, Artificial Sequence
  chemically synthesized
QSVSSY

SEQ ID NO: 1709 - protein, 3 aa, Artificial Sequence
  chemically synthesized
DAS

SEQ ID NO: 1710 - protein, 9 aa, Artificial Sequence
  chemically synthesized
QQSSNWPRT

SEQ ID NO: 1711 - protein, 8 aa, Artificial Sequence
  chemically synthesized
GYTFTNYY

SEQ ID NO: 1712 - protein, 8 aa, Artificial Sequence
  chemically synthesized
INPSNGGT

SEQ ID NO: 1713 - protein, 12 aa, Artificial Sequence
  chemically synthesized
RRDYRFDMGFDY

SEQ ID NO: 1714 - protein, 10 aa, Artificial Sequence
  chemically synthesized
KGVSTSGYSY

SEQ ID NO: 1715 - protein, 3 aa, Artificial Sequence
  chemically synthesized
LAS

SEQ ID NO: 1716 - protein, 9 aa, Artificial Sequence
  chemically synthesized
QHSRDLPLT

SEQ ID NO: 1717 - protein, 8 aa, Artificial Sequence
  chemically synthesized
ISWNSGVI

SEQ ID NO: 1718 - protein, 14 aa, Artificial Sequence
  chemically synthesized
AKGSGSYYVSWFDP

SEQ ID NO: 1719 - protein, 118 aa, Artificial Sequence
  chemically synthesized
EVKLVESGGGLVKPGGSLKLSCAASGFTFSSYGMSWLRQTPEKRLEWVATMSGGGRDIYYPDSMKGRFTISRDNAKNNLYLQMSSLRSEDTALYYCARQYYDDWFAYWGQGTLVTVSA

SEQ ID NO: 1720 - protein, 122 aa, Artificial Sequence
  chemically synthesized
QVQLKQSGPGLVQPSQNLSVTCTVSGFSLTTYGVHWVRQSPGKGLEWLGVIWSGGSTDYNAAFISRLTISKDNARSQVFFKMNSLQVNDTAMYYCAREKSVYGNYVGAMDYWGQGTSVTVSS

SEQ ID NO: 1721 - protein, 118 aa, Artificial Sequence
  chemically synthesized
EVKLVESGGGLVKPGGSLKLSCGASGFTFSSYGMSWVRQTPEKRLEWVATISGGGRDIYYPDSVKGRLTISRDNAKNNLYLQMSSLRSEDTALYYCVRQYYDDWFAYWGQGTLVTVSA

SEQ ID NO: 1722 - protein, 120 aa, Artificial Sequence
  chemically synthesized
DVQLQESGPGLVKPSQSLSLTCTVTGYSITSDYAWNWIRQFPGNQLEWMAYISYSGYTSYNPSLKSRISITRDTSKNQFFLQLNSVTTEDTATYYCARSLDYDYGTMDYWGQGTSVTVSS

SEQ ID NO: 1723 - protein, 117 aa, Artificial Sequence
  chemically synthesized
EVKLVESGGGLVKPGGSLKLSCAASGFAFRSYDMSWVRQTPEKILEWVATISGGGSYTYYQDSVKGRFTISRDNARNTLYLQMSSLRSEDTALYYCASPYGPYFDYWGQGTTLTVSS

SEQ ID NO: 1724 - protein, 120 aa, Artificial Sequence
  chemically synthesized
DVQLQESGPGLVKPSQSLSLTCTVTGYSITSDYAWNWIRQFPGNQLEWMAYISYSGYTSYNPSLKSRISITRDTSRNQFFLQLNSVTTEDTATYYCARSLDYDYGTMDYWGQGTSVTVSS

SEQ ID NO: 1725 - protein, 117 aa, Artificial Sequence
  chemically synthesized
EVKLVESGGGLVKPGGSLKLSCSASGFSFSYYDMSWVRQTPEKGLEWVATISGGGRNTYFIDSVKGRFTISRDNVKNNLYLLMSSLRSEDTALYYCASPYEGAVDFWGQGTSVTVSS

SEQ ID NO: 1726 - protein, 117 aa, Artificial Sequence
  chemically synthesized
EVKLVESGGGLVKPGGSLKLSCAASGFTFSSYGMSWVRQTPEKRLEWATISGGGRDTYYLDSVKGRFTISRDNAKNNLYLQMSSLRSEDTALYYCVRQYYDDWFAYWGQGTLVSNSA

SEQ ID NO: 1727 - protein, 120 aa, Artificial Sequence
  chemically synthesized
QVQLQQSGDELVRPGTSVKMSCKAAGYTFTNNWIGWVKQRPGHGLEWIGDFYPGGGYTNYNEKFKGKATLTADTSSSTAYMQLSSLTSEDSAIYYCARGYGTNYWYFDVWGAGTTVTVSS

SEQ ID NO: 1728 - protein, 114 aa, Artificial Sequence
  chemically synthesized
QIHLVQSGPELKKPGETVKISCKASGYTFTNFGMNWVKQAPGKGLKWMGWISGYTREPTYAADFKGRFAISLETSASTAYLQINDLKNEDMATYFCARDVFDYWGQGTTLTVSS

SEQ ID NO: 1729 - protein, 114 aa, Artificial Sequence
  chemically synthesized
QIQLVQSGSELKKPGASVKVSCKASGYTFTNFGMNWVRQAPGQGLKWMGWISGYTREPTYAADFKGRFVISLDTSVSTAYLQISSLKAEDTAVYYCARDVFDYWGQGTLVTVSS

SEQ ID NO: 1730 - protein, 120 aa, Artificial Sequence
  chemically synthesized
QVQLQESGPGLVKPSQTLSLTCTVSGYSISSDYAWNWIRQPPGKGLEWMAYISYSGYTSYNPSLKSRITISRDTSKNQFSLKLSSVTAADTAVYYCARSLDYDYGTMDYWGQGTLVTVSS

SEQ ID NO: 1731 - protein, 108 aa, Artificial Sequence
  chemically synthesized
DIVLTQTPATLSVTPGDSVSLSCRASQSISNNLHWYQQKSHESPRLLIKYASQSISGIPSRFSGSGSGTDFTLNINSVETEDFGMYFCQQSNSWPLTFGAGTKLELKR

SEQ ID NO: 1732 - protein, 108 aa, Artificial Sequence
  chemically synthesized
SIVMTQTPKFLLVSAGDRVTITCKASQSVSDDVAWYQQKPGQSPKLLIYYAFNRYTGVPDRFTGSGYGTDFTFTISTVQSEDLAVYFCQQDYRSPWTFGGGTKLEIKR

SEQ ID NO: 1733 - protein, 108 aa, Artificial Sequence
  chemically synthesized
DIVLTQSPATLSVTPGDSVSLSCRASQSISNDLHWYQQKSHESPRLLIKYVSQSISGIPSRFSGSGSGTDFTLSINSVETEDFGMYFCQQSDSWPLTFGAGTKLELKR

SEQ ID NO: 1734 - protein, 107 aa, Artificial Sequence
  chemically synthesized
QIVLSQSPAILSASPGEKVTMTCRANSSVSSMHWYQQKPGSSPEPWIYAISNLAFGVPTRFSGSGSGTSYSLTISRVEAEDAATYFCQQWSSRPPTFGGGTKLEIKR

SEQ ID NO: 1735 - protein, 108 aa, Artificial Sequence
  chemically synthesized
DIQMNQSPSSLSASLGDTITITCHASQSINVWLSWYQQKPGNIPKLLIYRASNLHTGVPSRFSGSGSGTGFTLTISSLQPDDIATYYCQQGQSYPWTFGGGTKLEIKR

SEQ ID NO: 1736 - protein, 107 aa, Artificial Sequence
  chemically synthesized
QIVLSQSPAILSASPGEKVTMTCRANSSVSSMHWYQQKPGSSPEPWIYAISNLAFGVPARFSGSGSGTSYSLTISRVEAEDAATYFCQQWNSRPPTFGGGTKLEIKR

SEQ ID NO: 1737 - protein, 108 aa, Artificial Sequence
  chemically synthesized
DIVMTQSHKVMSTSVGDRVSITCKASQDVDNAVAWYQQNPGQSPKLLIKWASTRHHGVPDRFTGSGSGTDFTLTISTVQSEDLADFFCQQYSTFPYTFGGGTKLEIKR

SEQ ID NO: 1738 - protein, 108 aa, Artificial Sequence
  chemically synthesized
DIVLTQTPATLSVTPGDSVSLSCRASQSLSNNLHWYQQKSHESPRLLIKYASQSISGIPSRFSGSGSGTDFTLSINSVETEDFGMYFCQQSNSWPLTFGAGTKLEMKR

SEQ ID NO: 1739 - protein, 108 aa, Artificial Sequence
  chemically synthesized
NIVMTQTPKILFISAGDRVTITCKASQSVSNDVAWYQQKPGQSPKLLIYYAFTRYIGVPDRFTGSGYGTDFTFTISTVQAEDLAVYFCQQDYSSPYTFGGGTKLEIKR

SEQ ID NO: 1740 - protein, 111 aa, Artificial Sequence
  chemically synthesized
DIVLTQSPASLAVSLGQRATISCRASESVDNYGYSFMNWFQQKPGQPPKLLIYRASNLESGIPARFSGSGSRTNFTLTINPVEADDVATYFCQQSNADPTFGGGTNLEIKR

SEQ ID NO: 1741 - protein, 110 aa, Artificial Sequence
  chemically synthesized
DIVLTQSPASLAVSPGQRATITCRASESVDNYGYSFMNWFQQKPGQPPKLLIYRASNLESGVPARFSGSGSRTDFTLTINPVEANDTANYYCQQSNADPTFGQGTKLEIK

SEQ ID NO: 1742 - protein, 106 aa, Artificial Sequence
  chemically synthesized
EIVLTQSPATLSLSPGERATLSCRANSSVSSMHWYQQKPGQSPEPWIYAISNLAFGVPARFSGSGSGTDYTLTISSLEPEDFAVYYCQQWSSRPPTFGQGTKLEIK

SEQ ID NO: 1743 - protein, 122 aa, Artificial Sequence
  chemically synthesized
QVQLVQSGSEVKKSGSSVKVSCKTSGGTFSITNYAINWVRQAPGQGLEWMGGILPIFGAAKYAQKFQDRVTITADESTNTAYLELSSLTSEDTAMYYCARGKRWLQSDLQYWGQGTLVTVSS

SEQ ID NO: 1744 - protein, 110 aa, Artificial Sequence
  chemically synthesized
QPVLTQPASVSGSPGQSITISCTGSSSDVGSYDLVSWYQQSPGKVPKLLIYEGVKRPSGVSNRFSGSKSGNTASLTISGLQAEDEADYYCSSYAGTRNFVFGGGTQLTVL

SEQ ID NO: 1745 - protein, 120 aa, Artificial Sequence
  chemically synthesized
QVQLVQSGAEVKKPGASVKVSCKASGYTFTNYYMYWVKQAPGQGLEWIGGINPSNGGTNYNEKFKNKATLTADKSTSTAYMELSSLRSEDTAVYYCTRRDYRYDMGFDYWGQGTTVTVSS

SEQ ID NO: 1746 - protein, 120 aa, Artificial Sequence
  chemically synthesized
QVQLVQSGAEVKKPGASVKVSCKASGYTFTSYYMYWVRQAPGQGLEWMGGVNPSNGGTNFNEKFKSRVTITADKSTSTAYMELSSLRSEDTAVYYCARRDYRYDMGFDYWGQGTTVTVSS

SEQ ID NO: 1747 - protein, 120 aa, Artificial Sequence
  chemically synthesized
EVQLQQSGPELVKPGASVKISCKASGYTFTNYYMYWVKQSHGKSLEWIGGINPSNGGTNYNEKFKNKATLTVDKSSSTAYMELNSLTSEDSAVYYCARRDYRYDMGFDYWGAGTTVTVSS

SEQ ID NO: 1748 - protein, 120 aa, Artificial Sequence
  chemically synthesized
EVQLQQSGPVLVKPGASVKMSCKASGYTFTSYYMYWVKQSHGKSLEWIGGVNPSNGGTNFNEKFKSKATLTVDKSSSTAYMELNSLTSEDSAVYYCARRDYRYDMGFDYWGQGTTLTVSS

SEQ ID NO: 1749 - protein, 111 aa, Artificial Sequence
  chemically synthesized
EIVLTQSPATLSLSPGERATISCRASKGVSTSGYSYLHWYQQKPGQAPRLLIYLASYLESGVPARFSGSGSGTDFTLTISSLEPEDFATYYCQHSRELPLTFGTGTKVEIK

SEQ ID NO: 1750 - protein, 111 aa, Artificial Sequence
  chemically synthesized
QIVLTQSPAIMSASPGEKVTMTCRASKGVSTSGYSYLHWYQQKPGSSPRLLIYLASYLESGVPVRFSGSGSGTSYSLTISRMEAEDAATYYCQHSRELPLTFGTGTRLEIK

SEQ ID NO: 1751 - protein, 5 aa, Artificial Sequence
  chemically synthesized
SYGMS

SEQ ID NO: 1752 - protein, 17 aa, Artificial Sequence
  chemically synthesized
TMSGGGRDIYYPDSMKG

SEQ ID NO: 1753 - protein, 9 aa, Artificial Sequence
  chemically synthesized
QYYDDWFAY

SEQ ID NO: 1754 - protein, 11 aa, Artificial Sequence
  chemically synthesized
RASQSISNNLH

SEQ ID NO: 1755 - protein, 7 aa, Artificial Sequence
  chemically synthesized
YASQSIS

SEQ ID NO: 1756 - protein, 9 aa, Artificial Sequence
  chemically synthesized
QQSNSWPLT

SEQ ID NO: 1757 - protein, 5 aa, Artificial Sequence
  chemically synthesized
TYGVH

SEQ ID NO: 1758 - protein, 16 aa, Artificial Sequence
  chemically synthesized
VIWSGGSTDYNAAFIS

SEQ ID NO: 1759 - protein, 14 aa, Artificial Sequence
  chemically synthesized
EKSVYGNYVGAMDY

SEQ ID NO: 1760 - protein, 11 aa, Artificial Sequence
  chemically synthesized
KASQSVSDDVA

SEQ ID NO: 1761 - protein, 7 aa, Artificial Sequence
  chemically synthesized
YAFNRYT

SEQ ID NO: 1762 - protein, 9 aa, Artificial Sequence
  chemically synthesized
QQDYRSPWT

SEQ ID NO: 1763 - protein, 17 aa, Artificial Sequence
  chemically synthesized
TISGGGRDIYYPDSVKG

SEQ ID NO: 1764 - protein, 11 aa, Artificial Sequence
  chemically synthesized
RASQSISNDLH

SEQ ID NO: 1765 - protein, 7 aa, Artificial Sequence
  chemically synthesized
YVSQSIS

SEQ ID NO: 1766 - protein, 9 aa, Artificial Sequence
  chemically synthesized
QQSDSWPLT

SEQ ID NO: 1767 - protein, 6 aa, Artificial Sequence
  chemically synthesized
SDYAWN

SEQ ID NO: 1768 - protein, 16 aa, Artificial Sequence
  chemically synthesized
YISYSGYTSYNPSLKS

SEQ ID NO: 1769 - protein, 11 aa, Artificial Sequence
  chemically synthesized
SLDYDYGTMDY

SEQ ID NO: 1770 - protein, 10 aa, Artificial Sequence
  chemically synthesized
RANSSVSSMH

SEQ ID NO: 1771 - protein, 7 aa, Artificial Sequence
  chemically synthesized
AISNLAF

SEQ ID NO: 1772 - protein, 9 aa, Artificial Sequence
  chemically synthesized
QQWSSRPPT

SEQ ID NO: 1773 - protein, 5 aa, Artificial Sequence
  chemically synthesized
SYDMS

SEQ ID NO: 1774 - protein, 17 aa, Artificial Sequence
  chemically synthesized
TISGGGSYTYYQDSVKG

SEQ ID NO: 1775 - protein, 8 aa, Artificial Sequence
  chemically synthesized
PYGPYFDY

SEQ ID NO: 1776 - protein, 11 aa, Artificial Sequence
  chemically synthesized
HASQSINVWLS

SEQ ID NO: 1777 - protein, 6 aa, Artificial Sequence
  chemically synthesized
ASNLHT

SEQ ID NO: 1778 - protein, 9 aa, Artificial Sequence
  chemically synthesized
QQGQSYPWT

SEQ ID NO: 1779 - protein, 9 aa, Artificial Sequence
  chemically synthesized
QQWNSRPPT

SEQ ID NO: 1780 - protein, 5 aa, Artificial Sequence
  chemically synthesized
YYDMS

SEQ ID NO: 1781 - protein, 17 aa, Artificial Sequence
  chemically synthesized
TISGGGRNTYFIDSVKG

SEQ ID NO: 1782 - protein, 8 aa, Artificial Sequence
  chemically synthesized
PYEGAVDF

SEQ ID NO: 1783 - protein, 11 aa, Artificial Sequence
  chemically synthesized
KASQDVDNAVA

SEQ ID NO: 1784 - protein, 7 aa, Artificial Sequence
  chemically synthesized
WASTRHH

SEQ ID NO: 1785 - protein, 9 aa, Artificial Sequence
  chemically synthesized
QQYSTFPYT

SEQ ID NO: 1786 - protein, 17 aa, Artificial Sequence
  chemically synthesized
TISGGGRDTYYLDSVKG

SEQ ID NO: 1787 - protein, 11 aa, Artificial Sequence
  chemically synthesized
RASQSLSNNLH

SEQ ID NO: 1788 - protein, 5 aa, Artificial Sequence
  chemically synthesized
NNWIG

SEQ ID NO: 1789 - protein, 17 aa, Artificial Sequence
  chemically synthesized
DFYPGGGYTNYNEKFKG

SEQ ID NO: 1790 - protein, 11 aa, Artificial Sequence
  chemically synthesized
GYGTNYWYFDV

SEQ ID NO: 1791 - protein, 11 aa, Artificial Sequence
  chemically synthesized
KASQSVSNDVA

SEQ ID NO: 1792 - protein, 7 aa, Artificial Sequence
  chemically synthesized
YAFTRYI

SEQ ID NO: 1793 - protein, 9 aa, Artificial Sequence
  chemically synthesized
QQDYSSPYT

SEQ ID NO: 1794 - protein, 5 aa, Artificial Sequence
  chemically synthesized
NFGMN

SEQ ID NO: 1795 - protein, 17 aa, Artificial Sequence
  chemically synthesized
WISGYTREPTYAADFKG

SEQ ID NO: 1796 - protein, 5 aa, Artificial Sequence
  chemically synthesized
DVFDY

SEQ ID NO: 1797 - protein, 15 aa, Artificial Sequence
  chemically synthesized
RASESVDNYGYSFMN

SEQ ID NO: 1798 - protein, 7 aa, Artificial Sequence
  chemically synthesized
RASNLES

SEQ ID NO: 1799 - protein, 8 aa, Artificial Sequence
  chemically synthesized
QQSNADPT

SEQ ID NO: 1800 - protein, 10 aa, Artificial Sequence
  chemically synthesized
GYTFTSYYMY

SEQ ID NO: 1801 - protein, 17 aa, Artificial Sequence
  chemically synthesized
GVNPSNGGTNFNEKFKS

SEQ ID NO: 1802 - protein, 11 aa, Artificial Sequence
  chemically synthesized
RDYRYDMGFDY

SEQ ID NO: 1803 - protein, 15 aa, Artificial Sequence
  chemically synthesized
RASKGVSTSGYSYLH

SEQ ID NO: 1804 - protein, 6 aa, Artificial Sequence
  chemically synthesized
LASYLE

SEQ ID NO: 1805 - protein, 9 aa, Artificial Sequence
  chemically synthesized
QHSRELPLT

SEQ ID NO: 1806 - protein, 10 aa, Artificial Sequence
  chemically synthesized
GYTFTNYYMY

SEQ ID NO: 1807 - protein, 329 aa, Artificial Sequence
  chemically synthesized
ASTKGPSVFPLAPSSKSTSGGTAALGCLVKDYFPEPVTVSWNSGALTSGVHTFPAVLQSSGLYSLSSVVTVPSSSLGTQTYICNVNHKPSNTKVDKKVEPKSCDKTHTCPPCPAPELLGGPSVFLFPPKPKDTLMISRTPEVTCVVVDVSHEDPEVKFNWYVDGVEVHNAKTKPREEQYQSTYRVVSVLTVLHQDWLNGKEYKCKVSNKALPAPIEKTISKAKGQPREPQVYTLPPSREEMTKNQVSLTCLVKGFYPSDIAVEWESNGQPENNYKTTPPVLDSDGSFFLYSKLTVDKSRWQQGNVFSCSVMHEALHNHYTQKSLSLSPG

SEQ ID NO: 1808 - protein, 254 aa, Artificial Sequence
  chemically synthesized
ACRICQDHPATKWNSGGGSSGGSISSGLLSGRSDNHGGGSYELTQPPSASVNVGETVKITCSGDQLPKYFADWFHQRSDQTILQVIYDDNKRPSGIPERISGSSSGTTATLTIRDVRAEDEGDYYCFSGYVDSDSKLYVFGSGTQLTVLGGPKSSPKVTVFPPSPEELRTNKATLVCLVNDFYPGSATVTWKANGATINDGVKTTKPSKQGQNYMTSSYLSLTADQWKSHNRVSCQVTHEGETVEKSLSPAECL

SEQ ID NO: 1809 - protein, 261 aa, Artificial Sequence
  chemically synthesized
QGQSGQGACRICQDHPATKWNSGGGSSGGSISSGLLSGRSDNHGGGSYELTQPPSASVNVGETVKITCSGDQLPKYFADWFHQRSDQTILQVIYDDNKRPSGIPERISGSSSGTTATLTIRDVRAEDEGDYYCFSGYVDSDSKLYVFGSGTQLTVLGGPKSSPKVTVFPPSPEELRTNKATLVCLVNDFYPGSATVTWKANGATINDGVKTTKPSKQGQNYMTSSYLSLTADQWKSHNRVSCQVTHEGETVEKSLSPAECL

SEQ ID NO: 1810 - protein, 254 aa, Artificial Sequence
  chemically synthesized
ACRICQDHPATKWNSGGGSSGGSISSGLLSGRSDNPGGGSYELTQPPSASVNVGETVKITCSGDQLPKYFADWFHQRSDQTILQVIYDDNKRPSGIPERISGSSSGTTATLTIRDVRAEDEGDYYCFSGYVDSDSKLYVFGSGTQLTVLGGPKSSPKVTVFPPSPEELRTNKATLVCLVNDFYPGSATVTWKANGATINDGVKTTKPSKQGQNYMTSSYLSLTADQWKSHNRVSCQVTHEGETVEKSLSPAECL

SEQ ID NO: 1811 - protein, 261 aa, Artificial Sequence
  chemically synthesized
QGQSGQGACRICQDHPATKWNSGGGSSGGSISSGLLSGRSDNPGGGSYELTQPPSASVNVGETVKITCSGDQLPKYFADWFHQRSDQTILQVIYDDNKRPSGIPERISGSSSGTTATLTIRDVRAEDEGDYYCFSGYVDSDSKLYVFGSGTQLTVLGGPKSSPKVTVFPPSPEELRTNKATLVCLVNDFYPGSATVTWKANGATINDGVKTTKPSKQGQNYMTSSYLSLTADQWKSHNRVSCQVTHEGETVEKSLSPAECL

SEQ ID NO: 1812 - protein, 254 aa, Artificial Sequence
  chemically synthesized
ACRICQDHPATKWNSGGGSSGGSISSGLLSGRSANPGGGSYELTQPPSASVNVGETVKITCSGDQLPKYFADWFHQRSDQTILQVIYDDNKRPSGIPERISGSSSGTTATLTIRDVRAEDEGDYYCFSGYVDSDSKLYVFGSGTQLTVLGGPKSSPKVTVFPPSPEELRTNKATLVCLVNDFYPGSATVTWKANGATINDGVKTTKPSKQGQNYMTSSYLSLTADQWKSHNRVSCQVTHEGETVEKSLSPAECL

SEQ ID NO: 1813 - protein, 261 aa, Artificial Sequence
  chemically synthesized
QGQSGQGACRICQDHPATKWNSGGGSSGGSISSGLLSGRSANPGGGSYELTQPPSASVNVGETVKITCSGDQLPKYFADWFHQRSDQTILQVIYDDNKRPSGIPERISGSSSGTTATLTIRDVRAEDEGDYYCFSGYVDSDSKLYVFGSGTQLTVLGGPKSSPKVTVFPPSPEELRTNKATLVCLVNDFYPGSATVTWKANGATINDGVKTTKPSKQGQNYMTSSYLSLTADQWKSHNRVSCQVTHEGETVEKSLSPAECL

SEQ ID NO: 1814 - protein, 254 aa, Artificial Sequence
  chemically synthesized
ACRICQDHPATKWNSGGGSSGGSISSGLLSGRSGNHGGGSYELTQPPSASVNVGETVKITCSGDQLPKYFADWFHQRSDQTILQVIYDDNKRPSGIPERISGSSSGTTATLTIRDVRAEDEGDYYCFSGYVDSDSKLYVFGSGTQLTVLGGPKSSPKVTVFPPSPEELRTNKATLVCLVNDFYPGSATVTWKANGATINDGVKTTKPSKQGQNYMTSSYLSLTADQWKSHNRVSCQVTHEGETVEKSLSPAECL

SEQ ID NO: 1815 - protein, 261 aa, Artificial Sequence
  chemically synthesized
QGQSGQGACRICQDHPATKWNSGGGSSGGSISSGLLSGRSGNHGGGSYELTQPPSASVNVGETVKITCSGDQLPKYFADWFHQRSDQTILQVIYDDNKRPSGIPERISGSSSGTTATLTIRDVRAEDEGDYYCFSGYVDSDSKLYVFGSGTQLTVLGGPKSSPKVTVFPPSPEELRTNKATLVCLVNDFYPGSATVTWKANGATINDGVKTTKPSKQGQNYMTSSYLSLTADQWKSHNRVSCQVTHEGETVEKSLSPAECL

SEQ ID NO: 1816 - protein, 256 aa, Artificial Sequence
  chemically synthesized
ACRICQDHPATKWNSGGGSSGGSISSGLLSGRSANPRGGGGSYELTQPPSASVNVGETVKITCSGDQLPKYFADWFHQRSDQTILQVIYDDNKRPSGIPERISGSSSGTTATLTIRDVRAEDEGDYYCFSGYVDSDSKLYVFGSGTQLTVLGGPKSSPKVTVFPPSPEELRTNKATLVCLVNDFYPGSATVTWKANGATINDGVKTTKPSKQGQNYMTSSYLSLTADQWKSHNRVSCQVTHEGETVEKSLSPAECL

SEQ ID NO: 1817 - protein, 263 aa, Artificial Sequence
  chemically synthesized
QGQSGQGACRICQDHPATKWNSGGGSSGGSISSGLLSGRSANPRGGGGSYELTQPPSASVNVGETVKITCSGDQLPKYFADWFHQRSDQTILQVIYDDNKRPSGIPERISGSSSGTTATLTIRDVRAEDEGDYYCFSGYVDSDSKLYVFGSGTQLTVLGGPKSSPKVTVFPPSPEELRTNKATLVCLVNDFYPGSATVTWKANGATINDGVKTTKPSKQGQNYMTSSYLSLTADQWKSHNRVSCQVTHEGETVEKSLSPAECL

SEQ ID NO: 1818 - protein, 254 aa, Artificial Sequence
  chemically synthesized
ACRICQDHPATKWNSGGGSSGGSISSGLLSGRSDDHGGGSYELTQPPSASVNVGETVKITCSGDQLPKYFADWFHQRSDQTILQVIYDDNKRPSGIPERISGSSSGTTATLTIRDVRAEDEGDYYCFSGYVDSDSKLYVFGSGTQLTVLGGPKSSPKVTVFPPSPEELRTNKATLVCLVNDFYPGSATVTWKANGATINDGVKTTKPSKQGQNYMTSSYLSLTADQWKSHNRVSCQVTHEGETVEKSLSPAECL

SEQ ID NO: 1819 - protein, 261 aa, Artificial Sequence
  chemically synthesized
QGQSGQGACRICQDHPATKWNSGGGSSGGSISSGLLSGRSDDHGGGSYELTQPPSASVNVGETVKITCSGDQLPKYFADWFHQRSDQTILQVIYDDNKRPSGIPERISGSSSGTTATLTIRDVRAEDEGDYYCFSGYVDSDSKLYVFGSGTQLTVLGGPKSSPKVTVFPPSPEELRTNKATLVCLVNDFYPGSATVTWKANGATINDGVKTTKPSKQGQNYMTSSYLSLTADQWKSHNRVSCQVTHEGETVEKSLSPAECL

SEQ ID NO: 1820 - protein, 254 aa, Artificial Sequence
  chemically synthesized
ACRICQDHPATKWNSGGGSSGGSISSGLLSGRSDIHGGGSYELTQPPSASVNVGETVKITCSGDQLPKYFADWFHQRSDQTILQVIYDDNKRPSGIPERISGSSSGTTATLTIRDVRAEDEGDYYCFSGYVDSDSKLYVFGSGTQLTVLGGPKSSPKVTVFPPSPEELRTNKATLVCLVNDFYPGSATVTWKANGATINDGVKTTKPSKQGQNYMTSSYLSLTADQWKSHNRVSCQVTHEGETVEKSLSPAECL

SEQ ID NO: 1821 - protein, 261 aa, Artificial Sequence
  chemically synthesized
QGQSGQGACRICQDHPATKWNSGGGSSGGSISSGLLSGRSDIHGGGSYELTQPPSASVNVGETVKITCSGDQLPKYFADWFHQRSDQTILQVIYDDNKRPSGIPERISGSSSGTTATLTIRDVRAEDEGDYYCFSGYVDSDSKLYVFGSGTQLTVLGGPKSSPKVTVFPPSPEELRTNKATLVCLVNDFYPGSATVTWKANGATINDGVKTTKPSKQGQNYMTSSYLSLTADQWKSHNRVSCQVTHEGETVEKSLSPAECL

SEQ ID NO: 1822 - protein, 254 aa, Artificial Sequence
  chemically synthesized
ACRICQDHPATKWNSGGGSSGGSISSGLLSGRSDQHGGGSYELTQPPSASVNVGETVKITCSGDQLPKYFADWFHQRSDQTILQVIYDDNKRPSGIPERISGSSSGTTATLTIRDVRAEDEGDYYCFSGYVDSDSKLYVFGSGTQLTVLGGPKSSPKVTVFPPSPEELRTNKATLVCLVNDFYPGSATVTWKANGATINDGVKTTKPSKQGQNYMTSSYLSLTADQWKSHNRVSCQVTHEGETVEKSLSPAECL

SEQ ID NO: 1823 - protein, 261 aa, Artificial Sequence
  chemically synthesized
QGQSGQGACRICQDHPATKWNSGGGSSGGSISSGLLSGRSDQHGGGSYELTQPPSASVNVGETVKITCSGDQLPKYFADWFHQRSDQTILQVIYDDNKRPSGIPERISGSSSGTTATLTIRDVRAEDEGDYYCFSGYVDSDSKLYVFGSGTQLTVLGGPKSSPKVTVFPPSPEELRTNKATLVCLVNDFYPGSATVTWKANGATINDGVKTTKPSKQGQNYMTSSYLSLTADQWKSHNRVSCQVTHEGETVEKSLSPAECL

SEQ ID NO: 1824 - protein, 254 aa, Artificial Sequence
  chemically synthesized
ACRICQDHPATKWNSGGGSSGGSISSGLLSGRSDTHGGGSYELTQPPSASVNVGETVKITCSGDQLPKYFADWFHQRSDQTILQVIYDDNKRPSGIPERISGSSSGTTATLTIRDVRAEDEGDYYCFSGYVDSDSKLYVFGSGTQLTVLGGPKSSPKVTVFPPSPEELRTNKATLVCLVNDFYPGSATVTWKANGATINDGVKTTKPSKQGQNYMTSSYLSLTADQWKSHNRVSCQVTHEGETVEKSLSPAECL

SEQ ID NO: 1825 - protein, 261 aa, Artificial Sequence
  chemically synthesized
QGQSGQGACRICQDHPATKWNSGGGSSGGSISSGLLSGRSDTHGGGSYELTQPPSASVNVGETVKITCSGDQLPKYFADWFHQRSDQTILQVIYDDNKRPSGIPERISGSSSGTTATLTIRDVRAEDEGDYYCFSGYVDSDSKLYVFGSGTQLTVLGGPKSSPKVTVFPPSPEELRTNKATLVCLVNDFYPGSATVTWKANGATINDGVKTTKPSKQGQNYMTSSYLSLTADQWKSHNRVSCQVTHEGETVEKSLSPAECL

SEQ ID NO: 1826 - protein, 254 aa, Artificial Sequence
  chemically synthesized
ACRICQDHPATKWNSGGGSSGGSISSGLLSGRSDYHGGGSYELTQPPSASVNVGETVKITCSGDQLPKYFADWFHQRSDQTILQVIYDDNKRPSGIPERISGSSSGTTATLTIRDVRAEDEGDYYCFSGYVDSDSKLYVFGSGTQLTVLGGPKSSPKVTVFPPSPEELRTNKATLVCLVNDFYPGSATVTWKANGATINDGVKTTKPSKQGQNYMTSSYLSLTADQWKSHNRVSCQVTHEGETVEKSLSPAECL

SEQ ID NO: 1827 - protein, 261 aa, Artificial Sequence
  chemically synthesized
QGQSGQGACRICQDHPATKWNSGGGSSGGSISSGLLSGRSDYHGGGSYELTQPPSASVNVGETVKITCSGDQLPKYFADWFHQRSDQTILQVIYDDNKRPSGIPERISGSSSGTTATLTIRDVRAEDEGDYYCFSGYVDSDSKLYVFGSGTQLTVLGGPKSSPKVTVFPPSPEELRTNKATLVCLVNDFYPGSATVTWKANGATINDGVKTTKPSKQGQNYMTSSYLSLTADQWKSHNRVSCQVTHEGETVEKSLSPAECL

SEQ ID NO: 1828 - protein, 254 aa, Artificial Sequence
  chemically synthesized
ACRICQDHPATKWNSGGGSSGGSISSGLLSGRSANIGGGSYELTQPPSASVNVGETVKITCSGDQLPKYFADWFHQRSDQTILQVIYDDNKRPSGIPERISGSSSGTTATLTIRDVRAEDEGDYYCFSGYVDSDSKLYVFGSGTQLTVLGGPKSSPKVTVFPPSPEELRTNKATLVCLVNDFYPGSATVTWKANGATINDGVKTTKPSKQGQNYMTSSYLSLTADQWKSHNRVSCQVTHEGETVEKSLSPAECL

SEQ ID NO: 1829 - protein, 261 aa, Artificial Sequence
  chemically synthesized
QGQSGQGACRICQDHPATKWNSGGGSSGGSISSGLLSGRSANIGGGSYELTQPPSASVNVGETVKITCSGDQLPKYFADWFHQRSDQTILQVIYDDNKRPSGIPERISGSSSGTTATLTIRDVRAEDEGDYYCFSGYVDSDSKLYVFGSGTQLTVLGGPKSSPKVTVFPPSPEELRTNKATLVCLVNDFYPGSATVTWKANGATINDGVKTTKPSKQGQNYMTSSYLSLTADQWKSHNRVSCQVTHEGETVEKSLSPAECL

SEQ ID NO: 1830 - protein, 254 aa, Artificial Sequence
  chemically synthesized
ACRICQDHPATKWNSGGGSSGGSISSGLLSGRSDNIGGGSYELTQPPSASVNVGETVKITCSGDQLPKYFADWFHQRSDQTILQVIYDDNKRPSGIPERISGSSSGTTATLTIRDVRAEDEGDYYCFSGYVDSDSKLYVFGSGTQLTVLGGPKSSPKVTVFPPSPEELRTNKATLVCLVNDFYPGSATVTWKANGATINDGVKTTKPSKQGQNYMTSSYLSLTADQWKSHNRVSCQVTHEGETVEKSLSPAECL

SEQ ID NO: 1831 - protein, 261 aa, Artificial Sequence
  chemically synthesized
QGQSGQGACRICQDHPATKWNSGGGSSGGSISSGLLSGRSDNIGGGSYELTQPPSASVNVGETVKITCSGDQLPKYFADWFHQRSDQTILQVIYDDNKRPSGIPERISGSSSGTTATLTIRDVRAEDEGDYYCFSGYVDSDSKLYVFGSGTQLTVLGGPKSSPKVTVFPPSPEELRTNKATLVCLVNDFYPGSATVTWKANGATINDGVKTTKPSKQGQNYMTSSYLSLTADQWKSHNRVSCQVTHEGETVEKSLSPAECL

SEQ ID NO: 1832 - protein, 17 aa, Artificial Sequence
  chemically synthesized
VISTHYGDTVYNQRFKG

SEQ ID NO: 1833 - protein, 16 aa, Artificial Sequence
  chemically synthesized
KSSQSLLDSGNQKNFL

SEQ ID NO: 1834 - protein, 220 aa, Artificial Sequence
  chemically synthesized
EIVLTQSPATLSLSPGERATLSCKSSQSLLDSGNQKNFLTWYQQKPGQAPRLLIYWASTRESGVPSRFSGSGSGTDFTFTISSLEAEDAATYYCQNDYSYPYTFGQGTKVEIKRTVAAPSVFIFPPSDEQLKSGTASVVCLLNNFYPREAKVQWKVDNALQSGNSQESVTEQDSKDSTYSLSSTLTLSKADYEKHKVYACEVTHQGLSSPVTKSFNRGEC

SEQ ID NO: 1835 - protein, 115 aa, Artificial Sequence
  chemically synthesized
DVQLQESGPGLVKPSQSLSLTCTVTGHSITSDYAWNWIRQFPGNKLEWMGYISYSGRTSYNPSLTSRISITRDTSKNQFFLQLNSVTTEDTATYYCARGYALDYWGQGTSVTVSS

SEQ ID NO: 1836 - protein, 120 aa, Artificial Sequence
  chemically synthesized
EVKLVESGGGLVSPGGSLKLSCAASGFTFSTFGMSWVRQTPEKRLEWVATISGGGSDTYYPDSVQGRFIISRYNAKNNLYLQMNSLRPEDTALYYCARQGYDVYSWFAYWGQGTLVTVSA

SEQ ID NO: 1837 - protein, 118 aa, Artificial Sequence
  chemically synthesized
EVKLVESGGGLVKPGGSLKLSCAASGFTFSTYGMSWVRQTPEKRLQWVATISGGGSNTYYSDSVKGRFTISRDNAKNNLYLQMSSLRSEDTALYYCARQRDSAWFASWGQGTLVTVSA

SEQ ID NO: 1838 - protein, 120 aa, Artificial Sequence
  chemically synthesized
EVQLVESGGGLVKPGGSLRLSCAASGFTFSTFGMSWVRQAPGKGLEWVSTISGGGSDTYYPDSVQGRFTISRDNAKNSLYLQMNSLRAEDTAVYYCARQGYDVYSWFAYWGQGTLVTVSS

SEQ ID NO: 1839 - protein, 120 aa, Artificial Sequence
  chemically synthesized
EVQLVESGGGLVQPGGSLRLSCAASGFTFSTFGMSWVRQAPGKGLEWVATISGGGSDTYYPDSVQGRFTISRDNAKNSLYLQMNSLRAEDTAVYYCARQGYDVYSWFAYWGQGTLVTVSS

SEQ ID NO: 1840 - protein, 118 aa, Artificial Sequence
  chemically synthesized
EVQLVESGGGLVKPGGSLRLSCAASGFTFSTYGMSWVRQAPGKGLEWVATISGGGSNTYYSDSVKGRFTISRDDSKNTLYLQMNSLKTEDTAVYYCARQRDSAWFASWGQGTLVTVSS

SEQ ID NO: 1841 - protein, 119 aa, Artificial Sequence
  chemically synthesized
EVQLVQSGAEVKKPGASVKVSCKASGYRFPHYGISWVRQAPGQGLEWMGWISAYNGNTNYAQKLQGRVTMTTDTSTNTAYMELRSLRSDDTAVYYCARDVDYGTGSGYWGQGTLVTVSS

SEQ ID NO: 1842 - protein, 119 aa, Artificial Sequence
  chemically synthesized
EVQLVQSGAEVKKPGASVKVSCKASGYRFTRQGISWVRQAPGQGLEWMGWISAYNGNTKYAQKLQGRVTMTTDTSTNTAYMELRSLRSDDTAVYYCARDVDYGSGSGYWGQGTLVTVSS

SEQ ID NO: 1843 - protein, 119 aa, Artificial Sequence
  chemically synthesized
EVQLVQSGAEVKKPGASVKVSCKASGYRFSTFGISWVRQAPGQGLEWMGWISAYNGNTNYAQKLQGRVTMTTDTSTNTAYMELRSLRSDDTAVYYCARDVDYSSGSGYWGQGTLVTVSS

SEQ ID NO: 1844 - protein, 119 aa, Artificial Sequence
  chemically synthesized
EVQLVQSGAEVKKPGASVKVSCKASGYRFTRYGISWVRQAPGQGLEWMGWVSAHNGNTNYAQKLQGRVTMTTDTSTNTAYMELRSLRSDDTAVYYCARDADYGSGSGYWGQGTLVTVSS

SEQ ID NO: 1845 - protein, 119 aa, Artificial Sequence
  chemically synthesized
EVQLVQSGAEVKKPGASVKVSCKASGYRFPHYGISWVRQAPGQGLEWMGWISAYNGNTNYAQKLQGRVTMTTDTSTNTAYMELRSLRSDDTAVYYCARDAEYGSGSGYWGQGTLVTVSS

SEQ ID NO: 1846 - protein, 119 aa, Artificial Sequence
  chemically synthesized
EVQLVQSGAEVKKPGASVKVSCKASGYRFTWYGISWVRQAPGQGLEWMGWISAYNGNTNYAQKLQGRVTMTTDTSTNTAYMELRSLRSDDTAVYYCARDSEYSSGSGYWGQGTLVTVSS

SEQ ID NO: 1847 - protein, 119 aa, Artificial Sequence
  chemically synthesized
EVQLVQSGAEVKKPGASVKVSCKASGYRFETYGISWVRQAPGQGLEWMGWISAYNGNTNYAQKLQGRVTMTTDTSTNTAYMELRSLRSDDTAVYYCARDAEYSLGSGYWGQGTLVTVSS

SEQ ID NO: 1848 - protein, 119 aa, Artificial Sequence
  chemically synthesized
EVQLVQSGAEVKKPGASVKVSCKASGYRFRQYGISWVRQAPGQGLEWMGWISAYNGNTNYAQKLQGRVTMTTDTSTNTAYMELRSLRSDDTAVYYCARDAEYGSGSGYWGQGTLVTVSS

SEQ ID NO: 1849 - protein, 119 aa, Artificial Sequence
  chemically synthesized
EVQLVQSGAEVKKPGASVKVSCKASGYRFTWYGISWVRQAPGQGLEWMGWISAYNGNTNYAQKLQGRVTMTTDTSTNTAYMELRSLRSDDTAVYYCARDSEYRSGSGYWGQGTLVTVSS

SEQ ID NO: 1850 - protein, 119 aa, Artificial Sequence
  chemically synthesized
EVQLVQSGAEVKKPGASVKVSCKASGYRFRQYGISWVRQAPGQGLEWMGWISAYNGNTNYAQKLQGRVTMTTDTSTNTAYMELRSLRSDDTAVYYCARDAEYRSGSGYWGQGTLVTVSS

SEQ ID NO: 1851 - protein, 120 aa, Artificial Sequence
  chemically synthesized
EVQLVQSGAEVKKPGASVKVSCKASGYRFTRYGISWVRQAPGQGLEWMGWVSAHNGNTNYAQKLQGRVTMTTDTSTNTAYMELRSLRSDDTAVYYCARDADYRSGSGYWGQGTLVTVSSS

SEQ ID NO: 1852 - protein, 119 aa, Artificial Sequence
  chemically synthesized
EVQLVQSGAEVKKPGASVKVSCKASGYRFPHYGISWVRQAPGQGLEWMGWISAYNGNTNYAQKLQGRVTMTTDTSTNTAYMELRSLRSDDTAVYYCARDVDYRTGSGYWGQGTLVTVSS

SEQ ID NO: 1853 - protein, 119 aa, Artificial Sequence
  chemically synthesized
EVQLVQSGAEVKKPGASVKVSCKASGYRFSTFGISWVRQAPGQGLEWMGWISAYNGNTNYAQKLQGRVTMTTDTSTNTAYMELRSLRSDDTAVYYCARDVDYRSGSGYWGQGTLVTVSS

SEQ ID NO: 1854 - protein, 119 aa, Artificial Sequence
  chemically synthesized
EVQLVQSGAEVKKPGASVKVSCKASGYRFTRQGISWVRQAPGQGLEWMGWISAYNGNTKYAQKLQGRVTMTTDTSTNTAYMELRSLRSDDTAVYYCARDVDYRSGSGYWGQGTLVTVSS

SEQ ID NO: 1855 - protein, 119 aa, Artificial Sequence
  chemically synthesized
EVQLVQSGAEVKKPGASVKVSCKASGYRFPHYGISWVRQAPGQGLEWMGWISAYNGNTNYAQKLQGRVTMTTDTSTNTAYMELRSLRSDDTAVYYCARDAEYRSGSGYWGQGTLVTVSS

SEQ ID NO: 1856 - protein, 108 aa, Artificial Sequence
  chemically synthesized
NIVMTQTPKFLLVSAGDRITITCKASQSVSDDVAWYQQKPGQSPKLLISYAFKRYIGVPDRFTGSGYGTDFTFTISTVQAEDLAVYFCQQNYNSPYTFGGGTKLELKR

SEQ ID NO: 1857 - protein, 106 aa, Artificial Sequence
  chemically synthesized
QIVLSQSPAILSASPGEKVTMTCRTSSSVNYMHWFQQKPGSSPKPWIYATSKLASGVPARFSGSGSGTSYSLTISRVEAEDAATYFCQQWISDPWTFGGGTKLEIK

SEQ ID NO: 1858 - protein, 108 aa, Artificial Sequence
  chemically synthesized
SYELTQPPSVSVSPGQTARITCSGDALTTQYAYWYQQKPGQAPVMVIYKDTERPSGIPERFSGSSSGTKVTLTISGVQAEDEADYYCQSADNSITYRVFGGGTKVTVL

SEQ ID NO: 1859 - protein, 108 aa, Artificial Sequence
  chemically synthesized
SYELTQPPSVSVSPGQTARITCSGDALSEQYAYWYQQKPGQAPVMVIYKDTERPSGIPERFSGSSSGTKVTLTISGVQAEDEADYYCQSADNSITYRVFGGGTKVTVL

SEQ ID NO: 1860 - protein, 106 aa, Artificial Sequence
  chemically synthesized
SYELTQPPSVSVSPGQTARITCSGDALPKQYAYWYQQKPGQAPVMVLYKDTERPSGIPERFSGSSSGTKVTLTISGVQAEDEDYYCQSDNSITYRVFGGGTKVTVL

SEQ ID NO: 1861 - protein, 108 aa, Artificial Sequence
  chemically synthesized
SYELTQPPSVSVSPGQTARITCSGDALPMQYGYWYQQKPGQAPVMVIYKDTERPSGIPERFSGSSSGTKVTLTISGVQAEDEADYYCQSADNSITYRVFGGGTKVTVL

SEQ ID NO: 1862 - protein, 111 aa, Artificial Sequence
  chemically synthesized
DIILTQSPASLAVSLGQRAAISCRASESVDNSGISFMSWFQQKPGQPPKLLIYTASNQGSGVPARFSGSGSGTEFSLNIHPMEEDDTAMYFCQQSKEVPWTFGGGTKLEIR

SEQ ID NO: 1863 - protein, 111 aa, Artificial Sequence
  chemically synthesized
DIVLTQSPASLAVSLGQRATISCRASENVDDYGVSFMNWFQQKPGQPPKLLIYPASNQGSGVPARFSGSGSGTDFSLNIHPMEEDDTAMYFCQQSKEVPWTFGGGTKLEIK

SEQ ID NO: 1864 - protein, 111 aa, Artificial Sequence
  chemically synthesized
DIQLTQSPSFLSASVGDRVTITCRASESVDNSGISFMSWYQQKPGKAPKLLIYTASNQGSGVPSRFSGSGSGTEFTLTISSLQPEDFATYYCQQSKEVPWTFGQGTKVEIK

SEQ ID NO: 1865 - protein, 111 aa, Artificial Sequence
  chemically synthesized
EIVLTQSPATLSLSPGERATLSCRASESVDNSGISFMSWYQQKPGQAPRLLIYTASNQGSGIPARFSGSGSGTDFTLTISSLEPEDFAVYYCQQSKEVPWTFGQGTKVEIK

SEQ ID NO: 1866 - protein, 111 aa, Artificial Sequence
  chemically synthesized
EIVLTQSPATLSLSPGERATLSCRASENVDDYGVSFMNWYQQKPGQAPRLLIYPASNQGSGIPARFSGSGSGTDFTLTISSLEPEDFAVYYCQQSKEVPWTFGQGTKVEIK

SEQ ID NO: 1867 - protein, 111 aa, Artificial Sequence
  chemically synthesized
EIVLTQSPGTLSLSPGERATLSCRASENVDDYGVSFMNWYQQKPGQAPRLLIYPASNQGSGIPDRFSGSGSGTDFTLTISRLEPEDFAVYYCQQSKEVPWTFGQGTKVEIK

SEQ ID NO: 1868 - protein, 111 aa, Artificial Sequence
  chemically synthesized
DIVMTQSPDSLAVSLGERATINCRASENVDDYGVSFMNWYQQKPGQPPKLLIYPASNQGSGVPDRFSGSGSGTDFTLTISSLQAEDVAVYYCQQSKEVPWTFGGGTKLEIK

SEQ ID NO: 1869 - protein, 119 aa, Artificial Sequence
  chemically synthesized
EVQLVQSGAEVKKPGASVKVSCKASGYRFETYGISWVRQAPGQGLEWMGWISAYNGNTNYAQKLQGRVTMTTDTSTNTAYMELRSLRSDDTAVYYCARDAEYRLGSGYWGQGTLVTVSS

SEQ ID NO: 1870 - protein, 117 aa, Artificial Sequence
  chemically synthesized
QVQLVQSGAEVKKPGASVKVSCKASGYTFTSYWINWVRQAPGQGLEWMGNIYPGSSLTNYNEKFKNRVTMTRDTSTSTVYMELSSLRSEDTAVYYCARLLTGTFAYWGQGTLVTVSS

SEQ ID NO: 1871 - protein, 117 aa, Artificial Sequence
  chemically synthesized
QVQLVQSGAEVKKPGASVKVSCKASGYTFTSYWINWVRQAPGQGLEWMGNIYPGSSLTNYNEKFKNRVTMTRDTSTSTVYMELSSLRSEDTAVYYCARLSTGTFAYWGQGTLVTVSS

SEQ ID NO: 1872 - protein, 117 aa, Artificial Sequence
  chemically synthesized
QVQLVQSGAEVKKPGASVKVSCKASGYTFTSYWINWVRQAPGQGLEWMGNIYPGSSITNYNEKFKNRVTMTRDTSTSTVYMELSSLRSEDTAVYYCARLTTGTFAYWGQGTLVTVSS

SEQ ID NO: 1873 - protein, 117 aa, Artificial Sequence
  chemically synthesized
QVQLVQSGAEVKKPGASVKVSCKASGYTFTSYWINWVRQAPGQGLEWMGNIWPGSSLTNYNEKFKNRVTMTRDTSTSTVYMELSSLRSEDTAVYYCARLLTGTFAYWGQGTLVTVSS

SEQ ID NO: 1874 - protein, 113 aa, Artificial Sequence
  chemically synthesized
DIVMTQSPDSLAVSLGERATINCKSSQSLWDSGNQKNFLTWYQQKPGQPPKLLIYWTSTRESGVPDRFSGSGSGTDFTLTISSLQAEDVAVYYCQNDYFYPLTFGGGTKVEIK

SEQ ID NO: 1875 - protein, 113 aa, Artificial Sequence
  chemically synthesized
DIVMTQSPDSLAVSLGERATINCKSSQSLWDSGNQKNFLTWYQQKPGQPPKLLIYWTSYRESGVPDRFSGSGSGTDFTLTISSLQAEDVAVYYCQNDYFYPLTFGGGTKVEIK

SEQ ID NO: 1876 - protein, 113 aa, Artificial Sequence
  chemically synthesized
DIVMTQSPDSLAVSLGERATINCKSSQSLWDSGNQKNFLTWYQQKPGQPPKLLIYWTSYRESGVPDRFSGSGSGTDFTLTISSLQAEDVAVYYCQNDYFYPHTFGGGTKVEIK

SEQ ID NO: 1877 - protein, 113 aa, Artificial Sequence
  chemically synthesized
DIVMTQSPDSLAVSLGERATINCKSSQSLWDSTNQKNFLTWYQQKPGQPPKLLIYWTSTRESGVPDRFSGSGSGTDFTLTISSLQAEDVAVYYCQNDYFYPLTFGGGTKVEIK

SEQ ID NO: 1878 - protein, 444 aa, Artificial Sequence
  chemically synthesized
QVQLVQSGAEVKKPGASVKVSCKASGYTFTSYWINWVRQAPGQGLEWMGNIYPGSSLTNYNEKFKNRVTMTRDTSTSTVYMELSSLRSEDTAVYYCARLSTGTFAYWGQGTLVTVSSASTKGPSVFPLAPCSRSTSESTAALGCLVKDYFPEPVTVSWNSGALTSGVHTFPAVLQSSGLYSLSSVVTVPSSSLGTKTYTCNVDHKPSNTKVDKRVESKYGPPCPPCPAPEFLGGPSVFLFPPKPKDTLMISRTPEVTCVVVDVSQEDPEVQFNWYVDGVEVHNAKTKPREEQFNSTYRVVSVLTVLHQDWLNGKEYKCKVSNKGLPSSIEKTISKAKGQPREPQVYTLPPSQEEMTKNQVSLTCLVKGFYPSDIAVEWESNGQPENNYKTTPPVLDSDGSFFLYSRLTVDKSRWQEGNVFSCSVMHEALHNHYTQKSLSLSLGK

SEQ ID NO: 1879 - protein, 443 aa, Artificial Sequence
  chemically synthesized
QVQLVQSGAEVKKPGASVKVSCKASGYTFTSYWINWVRQAPGQGLEWMGNIYPGSSLTNYNEKFKNRVTMTRDTSTSTVYMELSSLRSEDTAVYYCARLSTGTFAYWGQGTLVTVSSASTKGPSVFPLAPCSRSTSESTAALGCLVKDYFPEPVTVSWNSGALTSGVHTFPAVLQSSGLYSLSSVVTVPSSSLGTKTYTCNVDHKPSNTKVDKRVESKYGPPCPPCPAPEFLGGPSVFLFPPKPKDTLMISRTPEVTCVVVDVSQEDPEVQFNWYVDGVEVHNAKTKPREEQFNSTYRVVSVLTVLHQDWLNGKEYKCKVSNKGLPSSIEKTISKAKGQPREPQVYTLPPSQEEMTKNQVSLTCLVKGFYPSDIAVEWESNGQPENNYKTTPPVLDSDGSFFLYSRLTVDKSRWQEGNVFSCSVMHEALHNHYTQKSLSLSLG

SEQ ID NO: 1880 - protein, 221 aa, Artificial Sequence
  chemically synthesized
DIVMTQSPDSLAVSLGERATINCKSSQSLWDSGNQKNFLTWYQQKPGQPPKLLIYWTSYRESGVPDRFSGSGSGTDFTLTISSLQAEDVAVYYCQNDYFYPHTFGGGTKVEIKRGTVAAPSVFIFPPSDEQLKSGTASVVCLLNNFYPREAKVQWKVDNALQSGNSQESVTEQDSKDSTYSLSSTLTLSKADYEKHKVYACEVTHQGLSSPVTKSFNRGEC

SEQ ID NO: 1881 - protein, 6 aa, Artificial Sequence
  chemically synthesized
  MISC_FEATURE (2)..(2): X is T or R or I
  MISC_FEATURE (3)..(3): X is F or L
  MISC_FEATURE (4)..(4): X is S or E or T or P or R
  MISC_FEATURE (5)..(5): X is T or S or H or Q or R or W
  MISC_FEATURE (6)..(6): X is F or Y or Q
GXXXXX

SEQ ID NO: 1882 - protein, 17 aa, Artificial Sequence
  chemically synthesized
  MISC_FEATURE (2)..(2): X is I or V
  MISC_FEATURE (5)..(5): X is Y or H
  MISC_FEATURE (10)..(10): X is K or N
WXSAXNGNTXYAQKLQG

SEQ ID NO: 1883 - protein, 10 aa, Artificial Sequence
  chemically synthesized
  MISC_FEATURE (1)..(1): X is Q or Absent
  MISC_FEATURE (4)..(4): X is G or D
  MISC_FEATURE (5)..(5): X is N or V
  MISC_FEATURE (7)..(7): X is L or S
  MISC_FEATURE (8)..(8): X is Y or W
  MISC_FEATURE (9)..(9): X is D or A
  MISC_FEATURE (10)..(10): X is Y or V
XGYXXYXXXX

SEQ ID NO: 1884 - protein, 11 aa, Artificial Sequence
  chemically synthesized
  MISC_FEATURE (6)..(6): X is P or T or S
  MISC_FEATURE (7)..(7): X is M or T or E or K
  MISC_FEATURE (10)..(10): X is G or A
SGDALXXQYXY

SEQ ID NO: 1885 - protein, 9 aa, Artificial Sequence
  chemically synthesized
  MISC_FEATURE (3)..(3): X is N or S or W
  MISC_FEATURE (4)..(4): X is Y or K or I
  MISC_FEATURE (5)..(5): X is N or E or S
  MISC_FEATURE (6)..(6): X is S or V or D or T
  MISC_FEATURE (8)..(8): X is Y or W
QQXXXXPXT

SEQ ID NO: 1886 - protein, 4 aa, Artificial Sequence
  chemically synthesized
  MISC_FEATURE (1)..(1): X is T or R or W or Q or H or S
  MISC_FEATURE (2)..(2): X is Y or F or Q
  MISC_FEATURE (4)..(4): X is M or I
XXGX

SEQ ID NO: 1887 - protein, 17 aa, Artificial Sequence
  chemically synthesized
  MISC_FEATURE (1)..(1): X is T or A
  MISC_FEATURE (5)..(5): X is S or G
  MISC_FEATURE (7)..(7): X is S or G
  MISC_FEATURE (8)..(8): X is S or D or N
  MISC_FEATURE (12)..(12): X is A or P or S
  MISC_FEATURE (16)..(16): X is K or Q
XISGXGXXTYYXDSVXG

SEQ ID NO: 1888 - protein, 6 aa, Artificial Sequence
  chemically synthesized
  MISC_FEATURE (2)..(2): X is A or V or S
  MISC_FEATURE (3)..(3): X is D or E
  MISC_FEATURE (5)..(5): X is S or G or R
  MISC_FEATURE (6)..(6): X is S or L or T
DXXYXX

SEQ ID NO: 1889 - protein, 7 aa, Artificial Sequence
  chemically synthesized
GYIFSSY

SEQ ID NO: 1890 - protein, 6 aa, Artificial Sequence
  chemically synthesized
FPGSGS

SEQ ID NO: 1891 - protein, 10 aa, Artificial Sequence
  chemically synthesized
GYGNYLYFDV

SEQ ID NO: 1892 - protein, 7 aa, Artificial Sequence
  chemically synthesized
YAFKRYI

SEQ ID NO: 1893 - protein, 9 aa, Artificial Sequence
  chemically synthesized
QQNYNSPYT

SEQ ID NO: 1894 - protein, 5 aa, Artificial Sequence
  chemically synthesized
SYWIG

SEQ ID NO: 1895 - protein, 17 aa, Artificial Sequence
  chemically synthesized
KIFPGSGSADYNENFKG

SEQ ID NO: 1896 - protein, 10 aa, Artificial Sequence
  chemically synthesized
DSEYSSGSGY

SEQ ID NO: 1897 - protein, 11 aa, Artificial Sequence
  chemically synthesized
SGDALTTQYAY

SEQ ID NO: 1898 - protein, 15 aa, Artificial Sequence
  chemically synthesized
RASESVDNSGISFMS

SEQ ID NO: 1899 - protein, 7 aa, Artificial Sequence
  chemically synthesized
ATSKLAS

SEQ ID NO: 1900 - protein, 9 aa, Artificial Sequence
  chemically synthesized
QQWISDPWT

SEQ ID NO: 1901 - protein, 11 aa, Artificial Sequence
  chemically synthesized
SGDALSEQYAY

SEQ ID NO: 1902 - protein, 7 aa, Artificial Sequence
  chemically synthesized
TASNQGS

SEQ ID NO: 1903 - protein, 11 aa, Artificial Sequence
  chemically synthesized
SGDALPMQYGY

SEQ ID NO: 1904 - protein, 10 aa, Artificial Sequence
  chemically synthesized
RTSSSVNYMH

SEQ ID NO: 1905 - protein, 7 aa, Artificial Sequence
  chemically synthesized
GYRFTWY

SEQ ID NO: 1906 - protein, 6 aa, Artificial Sequence
  chemically synthesized
SAYNGN

SEQ ID NO: 1907 - protein, 10 aa, Artificial Sequence
  chemically synthesized
DVDYSSGSGY

SEQ ID NO: 1908 - protein, 5 aa, Artificial Sequence
  chemically synthesized
WYGIS

SEQ ID NO: 1909 - protein, 10 aa, Artificial Sequence
  chemically synthesized
DAEYSLGSGY

SEQ ID NO: 1910 - protein, 7 aa, Artificial Sequence
  chemically synthesized
GYRFSTF

SEQ ID NO: 1911 - protein, 6 aa, Artificial Sequence
  chemically synthesized
SAHNGN

SEQ ID NO: 1912 - protein, 10 aa, Artificial Sequence
  chemically synthesized
DAEYGSGSGY

SEQ ID NO: 1913 - protein, 5 aa, Artificial Sequence
  chemically synthesized
TFGIS

SEQ ID NO: 1914 - protein, 17 aa, Artificial Sequence
  chemically synthesized
WVSAHNGNTNYAQKLQG

SEQ ID NO: 1915 - protein, 10 aa, Artificial Sequence
  chemically synthesized
DADYGSGSGY

SEQ ID NO: 1916 - protein, 7 aa, Artificial Sequence
  chemically synthesized
GYRFETY

SEQ ID NO: 1917 - protein, 5 aa, Artificial Sequence
  chemically synthesized
SYSGR

SEQ ID NO: 1918 - protein, 10 aa, Artificial Sequence
  chemically synthesized
DVDYGTGSGY

SEQ ID NO: 1919 - protein, 7 aa, Artificial Sequence
  chemically synthesized
GYRFRQY

SEQ ID NO: 1920 - protein, 16 aa, Artificial Sequence
  chemically synthesized
YISYSGRTSYNPSLTS

SEQ ID NO: 1921 - protein, 10 aa, Artificial Sequence
  chemically synthesized
DVDYGSGSGY

SEQ ID NO: 1922 - protein, 5 aa, Artificial Sequence
  chemically synthesized
QYGIS

SEQ ID NO: 1923 - protein, 6 aa, Artificial Sequence
  chemically synthesized
SGGGSD

SEQ ID NO: 1924 - protein, 7 aa, Artificial Sequence
  chemically synthesized
GYRFTRY

SEQ ID NO: 1925 - protein, 17 aa, Artificial Sequence
  chemically synthesized
TISGGGSDTYYPDSVQG

SEQ ID NO: 1926 - protein, 5 aa, Artificial Sequence
  chemically synthesized
RYGIS

SEQ ID NO: 1927 - protein, 11 aa, Artificial Sequence
  chemically synthesized
QGYDVYSWFAY

SEQ ID NO: 1928 - protein, 7 aa, Artificial Sequence
  chemically synthesized
GYRFPHY

SEQ ID NO: 1929 - protein, 5 aa, Artificial Sequence
  chemically synthesized
HYGIS

SEQ ID NO: 1930 - protein, 7 aa, Artificial Sequence
  chemically synthesized
GYRFTRQ

SEQ ID NO: 1931 - protein, 5 aa, Artificial Sequence
  chemically synthesized
RQGIS

SEQ ID NO: 1932 - protein, 8 aa, Artificial Sequence
  chemically synthesized
GHSITSDY

SEQ ID NO: 1933 - protein, 7 aa, Artificial Sequence
  chemically synthesized
GFTFSTF

SEQ ID NO: 1934 - protein, 5 aa, Artificial Sequence
  chemically synthesized
TFGMS

SEQ ID NO: 1935 - protein, 8 aa, Artificial Sequence
  chemically synthesized
GWSLTGPG

SEQ ID NO: 1936 - protein, 7 aa, Artificial Sequence
  chemically synthesized
IYGDGST

SEQ ID NO: 1937 - protein, 8 aa, Artificial Sequence
  chemically synthesized
AYEYAMDW

SEQ ID NO: 1938 - protein, 10 aa, Artificial Sequence
  chemically synthesized
WSVSTSGKSY

SEQ ID NO: 1939 - protein, 3 aa, Artificial Sequence
  chemically synthesized
LLS

SEQ ID NO: 1940 - protein, 10 aa, Artificial Sequence
  chemically synthesized
GYTFTSYWIN

SEQ ID NO: 1941 - protein, 6 aa, Artificial Sequence
  chemically synthesized
YPGSSL

SEQ ID NO: 1942 - protein, 8 aa, Artificial Sequence
  chemically synthesized
LSTGTFAY

SEQ ID NO: 1943 - protein, 17 aa, Artificial Sequence
  chemically synthesized
KSSQSLWDSTNQKNFLT

SEQ ID NO: 1944 - protein, 7 aa, Artificial Sequence
  chemically synthesized
WTSTRES

SEQ ID NO: 1945 - protein, 9 aa, Artificial Sequence
  chemically synthesized
QNDYFYPLT

SEQ ID NO: 1946 - protein, 7 aa, Artificial Sequence
  chemically synthesized
GYTFTSY

SEQ ID NO: 1947 - protein, 17 aa, Artificial Sequence
  chemically synthesized
NIYPGSSLTNYNEKFKN

SEQ ID NO: 1948 - protein, 8 aa, Artificial Sequence
  chemically synthesized
LTTGTFAY

SEQ ID NO: 1949 - protein, 17 aa, Artificial Sequence
  chemically synthesized
KSSQSLWDSGNQKNFLT

SEQ ID NO: 1950 - protein, 7 aa, Artificial Sequence
  chemically synthesized
WTSYRES

SEQ ID NO: 1951 - protein, 9 aa, Artificial Sequence
  chemically synthesized
QNDYFYPHT

SEQ ID NO: 1952 - protein, 5 aa, Artificial Sequence
  chemically synthesized
SYWIN

SEQ ID NO: 1953 - protein, 6 aa, Artificial Sequence
  chemically synthesized
YPGSSI

SEQ ID NO: 1954 - protein, 8 aa, Artificial Sequence
  chemically synthesized
LLTGTFAY

SEQ ID NO: 1955 - protein, 17 aa, Artificial Sequence
  chemically synthesized
KSSQSLLDSGNQKNFLT

SEQ ID NO: 1956 - protein, 7 aa, Artificial Sequence
  chemically synthesized
  MISC_FEATURE (4)..(4): X is T or Y
WTSXRES

SEQ ID NO: 1957 - protein, 9 aa, Artificial Sequence
  chemically synthesized
QNDYSYPLT

SEQ ID NO: 1958 - protein, 17 aa, Artificial Sequence
  chemically synthesized
NIYPGSSITNYNEKFKN

SEQ ID NO: 1959 - protein, 8 aa, Artificial Sequence
  chemically synthesized
  MISC_FEATURE (2)..(2): X is L or S
LXTGTFAY

SEQ ID NO: 1960 - protein, 17 aa, Artificial Sequence
  chemically synthesized
  MISC_FEATURE (7)..(7): X is  W or L
  MISC_FEATURE (10)..(10): X is G or T
KSSQSLXDSXNQKNFLT

SEQ ID NO: 1961 - protein, 9 aa, Artificial Sequence
  chemically synthesized
  MISC_FEATURE (5)..(5): X is F or S
  MISC_FEATURE (8)..(8): X is L or H
QNDYXYPXT

SEQ ID NO: 1962 - protein, 6 aa, Artificial Sequence
  chemically synthesized
WPGSSL

SEQ ID NO: 1963 - protein, 17 aa, Artificial Sequence
  chemically synthesized
NIWPGSSLTNYNEKFKN

SEQ ID NO: 1964 - protein, 17 aa, Artificial Sequence
  chemically synthesized
NIYPGSSSTNYNEKFKN

SEQ ID NO: 1965 - protein, 17 aa, Artificial Sequence
  chemically synthesized
  MISC_FEATURE (3)..(3): X is Y or W
  MISC_FEATURE (8)..(8): X is L or I or S
NIXPGSSXTNYNEKFKN

SEQ ID NO: 1966 - protein, 8 aa, Artificial Sequence
  chemically synthesized
GLTFSSSG

SEQ ID NO: 1967 - protein, 6 aa, Artificial Sequence
  chemically synthesized
ATNNDY

SEQ ID NO: 1968 - protein, 7 aa, Artificial Sequence
  chemically synthesized
TASNRAT

SEQ ID NO: 1969 - protein, 9 aa, Artificial Sequence
  chemically synthesized
QQYSNWPRT

SEQ ID NO: 1970 - protein, 19 aa, Artificial Sequence
  chemically synthesized
GLSGRSDNHGGAVGLLAPP

SEQ ID NO: 1971 - protein, 21 aa, Artificial Sequence
  chemically synthesized
GLSGRSDNHGGVHMPLGFLGP

SEQ ID NO: 1972 - protein, 120 aa, Artificial Sequence
  chemically synthesized
EVQLQESGPELVRPGASVKMSCKASGYTFTSYWMHWVKQRPGQGLEWIGMIDPSNSETSLNQKFKDKATLNVDKSTNTAYMQLSSLTSEDSAVYYCARSRGNYAYEMDYWGQGTSVTVSS

SEQ ID NO: 1973 - protein, 120 aa, Artificial Sequence
  chemically synthesized
EVQLQESGPELVRPGASVKMSCKASGYTFTSYWMHWVKQRPGQGLEWIGMIEPSSSETSLNQKFKDKATLNVDKSSNTAYMQLSSLTSEDSAVYYCARSRGNYAYEMDYWGQGTSVTVSS

SEQ ID NO: 1974 - protein, 120 aa, Artificial Sequence
  chemically synthesized
EVQLQESGPELVRPGASVKMSCKASGYTFTSYWMHWVKQRPGQGLEWIGMIDPYSSETSLNQKFKDKATLNVDKISNTAYMQLSSLTSEDSAVYFCARSRGNYAYDMDYWGQGTSVTVSS

SEQ ID NO: 1975 - protein, 120 aa, Artificial Sequence
  chemically synthesized
EVQLQESGPELVRPGASVKMSCKASGYTFTSYWMHWVKQRPGQGLEWIGMIDPSNSETSLNQKFKDKATLNVDKSSKTAYMQLSSLTSEDSAVYYCARSRGNYAYDMDYWGQGTSVTVSS

SEQ ID NO: 1976 - protein, 117 aa, Artificial Sequence
  chemically synthesized
EVQLQESGAELVMPGASVKMSCKASGYTFTDYWMHWVKQRPGQGLEWIGAIDTSDSYTSYHQNFKGKATLTEDESSSTAYMQLSSLTSEDSAIYYCARRDYGGFGYWGQGTTLTVSS

SEQ ID NO: 1977 - protein, 116 aa, Artificial Sequence
  chemically synthesized
EVQLQESGPELVKPGASVKIPCKASGYTFTDYNMDWVKKSHGKSLEWIGDIDPNNGGTIYNQKFKGKATLTVDKSSRTAYMELRSLTSEDTAVYYCARWRSSMDYWGQGTSVTVSS

SEQ ID NO: 1978 - protein, 116 aa, Artificial Sequence
  chemically synthesized
EVQLQESGPELVKPGASVKIPCRASGYIFTDYNMDWVKQSHGKSLEWIGDIDPNNGGTIYNQKFKDKTTLTVDKSSRTAYMELRSLTSEDTAVYYCARWRSSMDYWGQGTSVTVSS

SEQ ID NO: 1979 - protein, 116 aa, Artificial Sequence
  chemically synthesized
EVQLQESGPELVKPGASVKIPCKASGYTFTDYNMDWVKQNHGKSLEWIGDIDPNNGDTIYNQKFKGKATLTVDKSSRTAYMELRSLTSEDTAVYYCARWRSSMDYWGQGTSVTVSS

SEQ ID NO: 1980 - protein, 116 aa, Artificial Sequence
  chemically synthesized
EVQLQESGPELVKPGASVKIPCKASGYTFTDYNMDWVKQSHGKSLEWIGDIDPNSGGSIYNQKFKGKATLTVDKSSRTVYMELRSLTSEDTAVYYCARWRSSMDYWGQGTSVTVSS

SEQ ID NO: 1981 - protein, 116 aa, Artificial Sequence
  chemically synthesized
EVQLQESGPELVKPGASVKITCKASGYTFTDYNMDWVKQSHGKSLEWIGDIDPNNGGTIYNQKFKGKATLTVDKSSNTAYMELRSLASEDTAVYYCARWRSSMDYWGQGTSVSVSS

SEQ ID NO: 1982 - protein, 116 aa, Artificial Sequence
  chemically synthesized
EVQLQESGPELVKPGASVKIPCKASGYTFTDYNMDWVKQSHGKSLEWIGDIDPNNGGTIYNQNFKGKATLTVDKSSSTAYMELRSLTSEDTAVYYCARWRSSMDYWGQGTSVTVSS

SEQ ID NO: 1983 - protein, 116 aa, Artificial Sequence
  chemically synthesized
EVQLQESGPELVKPGASVKIPCKASGYTFTDYNMDWVKQSHGKSLEWIGDIDPNNGGIIYNQKFKGKAALTVDKSSSTAYMELRSLTSEDTAVYYCARWRSSMDYWGQGTSVTVSS

SEQ ID NO: 1984 - protein, 116 aa, Artificial Sequence
  chemically synthesized
EVQLQESGPELVKPGASVKIPCKASGYTFTDYNMDWVKQSHGKSLEWIGDIDPNNGGIIYNQKFKGKAALTVDKSSSTAYMELRSLTSEDTAVYYCTRWRSSMDYWGQGTSVTVSS

SEQ ID NO: 1985 - protein, 116 aa, Artificial Sequence
  chemically synthesized
EVQLQESGPELVKPGASVKIPCKASGYTFTDYNMDWVKQSHGKSLEWIGDIDPNNGNTIYNQKFKGKATLTVDKSSSTAYMELRSLTSEDTAVYYCTKWRSSMDYWGQGTSVTVSS

SEQ ID NO: 1986 - protein, 116 aa, Artificial Sequence
  chemically synthesized
EVQLQESGPELVRPGASVKIPCKASGYTFTDYNMDWVMQSHGKSLEWIGDIDPNNGGTIYNQKFKGKATLTVDKSSSTAYMELRSLTSEDTAVYYCTRWRSSMDYWGQGTSVTVSS

SEQ ID NO: 1987 - protein, 116 aa, Artificial Sequence
  chemically synthesized
EVQLQESGPELVKPGASVKIPCKASGYTFTDYNVDWVKQSHGKSLEWIGDIDPNNGGTFYNQKFKGKATLTVDKSSSTAHMELRSLTSEDTAVYYCVRWRSSMDYWGQGTSVTVSS

SEQ ID NO: 1988 - protein, 116 aa, Artificial Sequence
  chemically synthesized
EVQLQESGPELVKPGASVKIPCKASGYTFTDYNMDWVKQSHGKSLEWIGDIDPNTGTTFYNQDFKGKATLTVDKSSSTAYMELRSLTSEDTAVYYCARWRSSMDYWGQGTSLTVSS

SEQ ID NO: 1989 - protein, 120 aa, Artificial Sequence
  chemically synthesized
EVQLQESGAELVRPGASVTLSCKASGYTFTDYEMHWVKQTPVHGLEWIGVIDPGTGGTAYNQKFKVKALLTADKSSNTAYMELRSLTSEDSAVYYCTSEKFGSNYYFDYWGQGTTLTVSS

SEQ ID NO: 1990 - protein, 120 aa, Artificial Sequence
  chemically synthesized
EVQLQESGAELVRPGASVTLSCKASGYTFTDYEIHWVKQTPVHGLEWIGAIDPETGGTAYNQKFKGKAILTADKSSSTAYMELRSLTSEDSAVYYCTSEKFGSSYYFDYWGQGTTFTVSS

SEQ ID NO: 1991 - protein, 118 aa, Artificial Sequence
  chemically synthesized
EVQLQESGPGLVKPSQSLSLTCTVTGYSITSDYAWNWIRQFPGNKLEWMGYITYSGSPTYNPSLKSQFSITRDTSKNQFFLQLNSLTTEDTATYYCARGLGGHYFDYWGQGTTLTVSS

SEQ ID NO: 1992 - protein, 118 aa, Artificial Sequence
  chemically synthesized
EVQLQESGPGLVKPSQSLSLTCTVTGYSITSDYAWNWIRQFPGNKLEWMGYITYSGSPTYNPSLKSQFSITRDTSKNQFFLQLNSVTTEDTATYYCARGLGGHYFDYWGQGTTLTVSS

SEQ ID NO: 1993 - protein, 117 aa, Artificial Sequence
  chemically synthesized
EVQLQESGPDLVKPSQSLSLTCTVTGYSITSGYSWHWIRQFPGNKLEWMGFIHYSGDTNYNPSLKSRFSITRDTSKNQFFLHLNSVTPEDTATYYCASPSRLLFDYWGHGTTLTVSS

SEQ ID NO: 1994 - protein, 113 aa, Artificial Sequence
  chemically synthesized
EVQLQESGPGLVAPSQSLSITCTVSGFSLTNYGVDWVRQSPGKGLEWLGVIWGVGSTNYNSALKSRLSISKDNSKSQVFLKMNSLQTDDTAMYYCASDGFVYWGQGTLVTVSS

SEQ ID NO: 1995 - protein, 113 aa, Artificial Sequence
  chemically synthesized
EVQLQESGPGLVAPSQSLSITCTVSGFSLTSYGVDWVRQSPGKGLEWLGVIWGIGSTNYNSALKSRLSISKDNSKSQVFLKMNSLQSDDTAMYYCASDGFVYWGQGTLVTVSS

SEQ ID NO: 1996 - protein, 114 aa, Artificial Sequence
  chemically synthesized
EVQLQESGPSLVQPSQSLSITCTVSGFSLTSYGVHWVRQSPGKGLEWLGVIWRGGNTDYNAAFMSRLSITKDNSKSQVFFKMNSLQADDTAIYYCAASMIGGYWGQGTTLTVSS

SEQ ID NO: 1997 - protein, 114 aa, Artificial Sequence
  chemically synthesized
EVQLQESGPSLVQPSQSLSITCTVSGFSLTNYGVHWVRQSPGKGLEWLGVIWRGGNTDYNAAFMSRLSITKDNSKSQVFFKFHSLQTDDTAIYYCAASMIGGYWGQGTTLTVSS

SEQ ID NO: 1998 - protein, 120 aa, Artificial Sequence
  chemically synthesized
QVQLVQSGAEVKKPGASVKVSCKASGYTFTSYWMHWVRQAPGQGLEWMGMIDPSNSETSLNQKFQGRVTMTVDKSTNTVYMELSSLRSEDTAVYYCARSRGNYAYEMDYWGQGTLVTVSS

SEQ ID NO: 1999 - protein, 120 aa, Artificial Sequence
  chemically synthesized
EVQLVQSGAEVKKPGASVKVSCKASGYTFTSYWMHWVRQAPGQGLEWMGMIDPSNSETSLNQKFQGRVTLNVDKSTNTAYMELSSLRSEDTAVYYCARSRGNYAYEMDYWGQGTLVTVSS

SEQ ID NO: 2000 - protein, 120 aa, Artificial Sequence
  chemically synthesized
EVQLVQSGTEVTKPGASVKVSCKASGYTFTSYWMHWVRQAPGQGLEWLGMIDPSNSETTLNQKFQGRVTMTVDKSTNTVYMELTSLRSEDTAVYYCARSRGNYAYEMDYWGQGTLVTVSS

SEQ ID NO: 2001 - protein, 120 aa, Artificial Sequence
  chemically synthesized
EVQLVQSGAEVKKPGASVKVSCKASGYTFTDYEMHWVRQAPGQGLEWMGIIDPGTGGTAYNQKFQGRVTMTADKSTSTVYMELSSLRSEDTAVYYCTSEKFGSNYYFDYWGQGTLVTVSS

SEQ ID NO: 2002 - protein, 120 aa, Artificial Sequence
  chemically synthesized
EVQLVQSGAEVKKPGASVKVSCKASGYTFTDYEMHWVRQAPGQGLEWMGIIDPGTGGTAYNQKFQGRVTMTADKSTNTVYMELSSLRSEDTAVYYCTSEKFGSNYYFDYWGQGTLVTVSS

SEQ ID NO: 2003 - protein, 120 aa, Artificial Sequence
  chemically synthesized
EVQLVQSGAEVKKPGASVKVSCKASGYTFTDYEMHWVRQAPGQRLEWMGVIDPGTGGTAYNQKFQGRVTITADKSASTAYMELSSLRSEDTAVYYCTSEKFGSNYYFDYWGQGTLVTVSS

SEQ ID NO: 2004 - protein, 108 aa, Artificial Sequence
  chemically synthesized
DIVLTQTPAIMSASPGEKVTLTCSASSSVSSNYLYWYQQRPGSSPKLWIYSTSNLASGVPARFSGSGSGTSYSLTISSMEAEDAASYFCHQWSSYPPTFGSGTKLEIK

SEQ ID NO: 2005 - protein, 108 aa, Artificial Sequence
  chemically synthesized
DIVITQTTAIMSASPGEKVTLTCSASSSVSSNYLYWYQQRPGSSPKLWIYSTSNLASGVPARFSGSGSGTSYSLTISSMEAEDAASYFCHQWSSYPPTFGSGTKLEIK

SEQ ID NO: 2006 - protein, 108 aa, Artificial Sequence
  chemically synthesized
DIVMTQTPATMSASPGEKVTLTCSASSSVNSNYLYWYQQKPGSSPKVWIYSTSNLASGVPARFSGSGSGTSYSLTISSMEAEDAASYFCHQWSSYPPTFGSGTKLELK

SEQ ID NO: 2007 - protein, 108 aa, Artificial Sequence
  chemically synthesized
DIVMTQTTATMSASPGEKVTLTCSASSSVNSNYLYWYQQKPGSSPKVWIYSTSNLASGVPARFSGSGSGTSYSLTISSMEAEDAASYFCHQWSSYPPTFGSGTKLELK

SEQ ID NO: 2008 - protein, 108 aa, Artificial Sequence
  chemically synthesized
DIVLTQSTAIMSASPGEKVTLTCSASSGVNSNYLYWYQQKPGSSPKLWIYSTSNLASGVPARFSGSGSGTSYSLTISSVEAEDAASYFCHQWSSYPPTFGSGTKLEIK

SEQ ID NO: 2009 - protein, 107 aa, Artificial Sequence
  chemically synthesized
DIVLTQTPSSLSASLGDRVTISCSASQGISNYLNWYQQKPDGTVKLLIYYTSSLHSGVPSRFSGSGSGTDYSLTISNLEPEDIATYYCQQYSKLPWTFGGGTKLEIK

SEQ ID NO: 2010 - protein, 107 aa, Artificial Sequence
  chemically synthesized
DIVLTQSPSSLSASLGDRVTISCSASQGISNYLNWYQQKPDGTVKLLIYYTSSLHSGVPSRFSGSGSGTDYSLTISNLEPEDIATYYCQQYSKLPWTFGGGTKLEIK

SEQ ID NO: 2011 - protein, 107 aa, Artificial Sequence
  chemically synthesized
DIVITQSPSSLSASLGDRVTISCSASQGISNYLNWYQQKPDGTVKLLIYYTSSLHSGVPSRFSGSGSGTDYSLTISNLEPEDIATYYCQQYSELPWTFGGGTKLEIK

SEQ ID NO: 2012 - protein, 107 aa, Artificial Sequence
  chemically synthesized
DIVMTQSPSSLSASLGDRVTISCSASQGISNYLNWYQQRPDGTVKLLIYYTSSLHSGVPSRFSGSGSGTDYSLTISNLEPEDIATYYCQQYSNLPWTFGGGTKLEIK

SEQ ID NO: 2013 - protein, 107 aa, Artificial Sequence
  chemically synthesized
DIVMTQSPSSLSASLGDRVTISCSASQGISNYLNWYQQKPDGTVKLLIYYTSSLHSGVPSRFSGSGSGTDYSLTISNLEPEDIATYYCQQYSELPWTFGGGTKLEIK

SEQ ID NO: 2014 - protein, 107 aa, Artificial Sequence
  chemically synthesized
DIVMTQSTSSLSASLGDRVTISCSASQGISHYLNWYQQKPDGTVKLLIYYTSSLHSGVPSRFSGSGSGTDYSLTIRNLEPEDIATYYCQQYSELPWTFGGGTKLEIK

SEQ ID NO: 2015 - protein, 107 aa, Artificial Sequence
  chemically synthesized
DIVMTQSPSSLSASLGDRVTISCSASQGISHYLNWYQQKPDGTVKLLIYYTSSLHSGVPSRFSGSGSGTDYSLTIRNLEPEDIATYYCQQYSELPWTFGGGTKLEIK

SEQ ID NO: 2016 - protein, 107 aa, Artificial Sequence
  chemically synthesized
DIVMTQSPSSLSASLGDRVTISCSASQDISSYLNWYQQKPDGTVKLLIYYTSSLHSGVPSRFSGSGSGTDYSLTISNLEPEDIATYYCQQYSELPWTFGGGTKLEIK

SEQ ID NO: 2017 - protein, 107 aa, Artificial Sequence
  chemically synthesized
DIVMTQTPSSLSASLGDRVTISCSASQGISYYLNWYQQKPDGTIKLLIYYTLSLHSGVPSRFSGSGSGTDYSLTISNLEPEDIATYYCQQYSELPWTFGGGTKLEIK

SEQ ID NO: 2018 - protein, 107 aa, Artificial Sequence
  chemically synthesized
DIVMTQTPSSMSASLGDRVTISCSASQGISNYLNWYQQKPDGTVKLLIYYTSSLHSGVPSRFSGSGSGTDYSLTISNLEPEDIATYYCQQYSYLPWTFGGGTKLEIK

SEQ ID NO: 2019 - protein, 107 aa, Artificial Sequence
  chemically synthesized
DIVMTQTPSSLSASLGDRVTISCSASQGIGNYLNWYQQKPDGTVKLLIYYTSNLHSGVPSRFSGRGSGTDYSLTISNLEPEDIATYYCQQYSNLPWTFGGGTKLEIK

SEQ ID NO: 2020 - protein, 107 aa, Artificial Sequence
  chemically synthesized
DIVMTQSPSSLSASLGDRVTISCSASQGISNYLNWYQQKPDGTVKLLIYYTSNLHSGVPSRFSGSGSGTDYSLTISDLAPEDIATYYCQQYSYLPWTFGGGTKLEIK

SEQ ID NO: 2021 - protein, 112 aa, Artificial Sequence
  chemically synthesized
DIVITQSPLSLPVGLGDQASISCRSSQSLVHSNGNTYLHWYLQKPGQSPKLLIYKVSNRFSGVPDRFSGSGSGTDFTLKISRVEAEDLGVYFCSQSTHVPYTFGGGTKLEIK

SEQ ID NO: 2022 - protein, 112 aa, Artificial Sequence
  chemically synthesized
DIVLTQTPLSLPVSLGDQASISCRSSQSIVHSNGNTYLEWYLQKPGQSPKLLIYKVSNRFSGVPDRFSGSGSGTNFTLKISRVEAEDLGVYYCFQGSHVPLTFGAGTKLELK

SEQ ID NO: 2023 - protein, 112 aa, Artificial Sequence
  chemically synthesized
DIVLTQSPLSLPVSLGDQASISCRSSQSIVHSDGNTYLEWYLQKPGQSPKLLIYKVSNRFSGVPDRFSGSGSGTDFTLKISRVEAEDLGIYYCFQGSHVPLTFGAGTKLELK

SEQ ID NO: 2024 - protein, 112 aa, Artificial Sequence
  chemically synthesized
DIVITQTPLSLPVSLGDQASISCRSSQTIVHSDGNTYLEWYLQKPGQSPKLLIYKVSNRFSGVPDRFSGSGSGTDFTLKISRVEAEDLGVYYCFQGSHVPLTFGAGTKLEIK

SEQ ID NO: 2025 - protein, 112 aa, Artificial Sequence
  chemically synthesized
DIVMTQSTLSLPVSLGDQVSISCRSSQSIVHSDGNTYLEWYLQKPGQSPNLLIYKVSNRFSGVPDRFSGSGSGTDFTLKISRVEAEDLGVYYCFQGSHVPLTFGAGTKLELK

SEQ ID NO: 2026 - protein, 112 aa, Artificial Sequence
  chemically synthesized
DIVLTQDELSNPVTSGESVSISCRSSKSLLYKDGKTYLNWFLQRPGQSPQVLIYFMSTRASGVSDRFSGSGSGTDFTLEISRVKAEDVGVYYCQQLVDFPFTFGSGTKLELK

SEQ ID NO: 2027 - protein, 112 aa, Artificial Sequence
  chemically synthesized
DIVMTQDELYNPVTSGESVSISCRSSKSLLYKDGKTYLNWFLQRPGQSPQVLIYFMSTRASGVSDRFSGSGSGTDFTLEISRVKAEDVGVYYCQQLVDFPFTFGSGTKLEIK

SEQ ID NO: 2028 - protein, 113 aa, Artificial Sequence
  chemically synthesized
DIVMTQSPSSLTVTAGEKVTMSCKSSQSLLNSGTQKNYLTWYQQKPGQPPKLLIYWASTRESGVPDRFTGSGSGTDFTLTISSVQAEDLAVYYCQNDYSYPLTFGAGTKLEIK

SEQ ID NO: 2029 - protein, 107 aa, Artificial Sequence
  chemically synthesized
DIVLTQTTATLSVTPGDRVSLSCRASQSISDYLHWYQQKSHESPRLLIKYASQSISGIPSRFSGSGSGSDFTLTVNSVEPEDVGVYYCQNGHSYPYTFGGGTKLEIK

SEQ ID NO: 2030 - protein, 107 aa, Artificial Sequence
  chemically synthesized
DIVLTQSPDTLSVTPGDRVSLSCRASQSISDYLHWYQQKSHESPRLLIKYASQSISGIPSRFSGSGSGSDFTLSINSVEPEDVGVYYCQNGHSYPYTFGGGTKLELK

SEQ ID NO: 2031 - protein, 108 aa, Artificial Sequence
  chemically synthesized
EIVLTQSPATLSLSPGERATLSCRASSSVSSNYLYWYQQKPGQAPRLLIYSTSNRATGIPARFSGSGSGTDYTLTISSLEPEDFAVYYCHQWSSYPPTFGQGTKLEIK

SEQ ID NO: 2032 - protein, 108 aa, Artificial Sequence
  chemically synthesized
DIVLTQSPATLSLSPGERATLSCRASSSVSSNYLYWYQQKPGQAPRLLIYSTSNLATGIPARFSGSGSGTDYTLTISSLEPEDFAVYFCHQWSSYPPTFGQGTKLEIK

SEQ ID NO: 2033 - skipped

SEQ ID NO: 2034 - protein, 108 aa, Artificial Sequence
  chemically synthesized
DIVLTQSPGTLSLSPGEKVTLSCRASSSVSSNYLYWYQQKPGQAPRLVIYSTSNLATGIPDRFSGSGSGTDYTLTISRLEPEDFAVYFCHQWSSYPPTFGQGTKVEIK

SEQ ID NO: 2035 - protein, 112 aa, Artificial Sequence
  chemically synthesized
DVVMTQSPLSLPVTLGQPASISCRSSQTIVHSDGNTYLEWYQQRPGQSPRLLIYKVSNRFSGVPDRFSGSGSGTDFTLKISRVEAEDVGVYYCFQGSHVPLTFGQGTKLEIK

SEQ ID NO: 2036 - protein, 112 aa, Artificial Sequence
  chemically synthesized
DIVMTQSPLSLPVTLGQPASISCRSSQTIVHSDGNTYLEWYQQRPGQSPKLLIYKVSNRFSGVPDRFSGSGSGTDFTLKISRVEAEDVGVYYCFQGSHVPLTFGQGTKLEIK

SEQ ID NO: 2037 - protein, 112 aa, Artificial Sequence
  chemically synthesized
DIVMTQTPLSSPVTLGQPASISCRSSQTIVHSDGNTYLEWYQQRPGQPPRLLIYKVSNRFSGVPDRFSGSGAGTDFTLKISRVEAEDVGVYYCFQGSHVPLTFGQGTKLEIK

SEQ ID NO: 2038 - protein, 6 aa, Artificial Sequence
  chemically synthesized
GYALDY

SEQ ID NO: 2039 - protein, 9 aa, Artificial Sequence
  chemically synthesized
QRDSAWFAS

SEQ ID NO: 2040 - protein, 7 aa, Artificial Sequence
  chemically synthesized
YHIRDLT

SEQ ID NO: 2041 - protein, 11 aa, Artificial Sequence
  chemically synthesized
AYISNQGGDTH

SEQ ID NO: 2042 - protein, 6 aa, Artificial Sequence
  chemically synthesized
GQSGQG

SEQ ID NO: 2043 - protein, 5 aa, Artificial Sequence
  chemically synthesized
QSGQG

SEQ ID NO: 2044 - protein, 4 aa, Artificial Sequence
  chemically synthesized
SGQG

SEQ ID NO: 2045 - protein, 3 aa, Artificial Sequence
  chemically synthesized
GQG

SEQ ID NO: 2046 - protein, 2 aa, Artificial Sequence
  chemically synthesized
QG

SEQ ID NO: 2047 - protein, 446 aa, Artificial Sequence
  chemically synthesized
EVQLVESGGGLVQPGGSLRLSCAASGFTFSGYAMSWVRQAPGKGLEWVAYISNSGGNAHYADSVKGRFTISRDNSKNTLYLQMNSLRAEDTAVYYCTREDYGTSPFVYWGQGTLVTVSSASTKGPSVFPLAPCSRSTSESTAALGCLVKDYFPEPVTVSWNSGALTSGVHTFPAVLQSSGLYSLSSVVTVPSSSLGTKTYTCNVDHKPSNTKVDKRVESKYGPPCPPCPAPEFLGGPSVFLFPPKPKDTLMISRTPEVTCVVVDVSQEDPEVQFNWYVDGVEVHNAKTKPREEQFNSTYRVVSVLTVLHQDWLNGKEYKCKVSNKGLPSSIEKTISKAKGQPREPQVYTLPPSQEEMTKNQVSLTCLVKGFYPSDIAVEWESNGQPENNYKTTPPVLDSDGSFFLYSRLTVDKSRWQEGNVFSCSVMHEALHNHYTQKSLSLSLGK

SEQ ID NO: 2048 - protein, 448 aa, Artificial Sequence
  chemically synthesized
EVQLVESGGGLVQPGGSLRLSCAASGFTFSGYAMSWVRQAPGKGLEWVAYISNSGGNAHYADSVKGRFTISRDNSKNTLYLQMNSLRAEDTAVYYCTREDYGTSPFVYWGQGTLVTVSSASTKGPSVFPLAPSSKSTSGGTAALGCLVKDYFPEPVTVSWNSGALTSGVHTFPAVLQSSGLYSLSSVVTVPSSSLGTQTYICNVNHKPSNTKVDKKVEPKSCDKTHTCPPCPAPELLGGPSVFLFPPKPKDTLMISRTPEVTCVVVDVSHEDPEVKFNWYVDGVEVHNAKTKPREEQYNSTYRVVSVLTVLHQDWLNGKEYKCKVSNKALPAPIEKTISKAKGQPREPQVYTLPPSREEMTKNQVSLTCLVKGFYPSDIAVEWESNGQPENNYKTTPPVLDSDGSFFLYSKLTVDKSRWQQGNVFSCSVMHEALHNHYTQKSLSLSPG

SEQ ID NO: 2049 - protein, 448 aa, Artificial Sequence
  chemically synthesized
EVQLVESGGGLVQPGGSLRLSCAASGFTFSGYAMSWVRQAPGKGLEWVAYISNSGGNAHYADSVKGRFTISRDNSKNTLYLQMNSLRAEDTAVYYCTREDYGTSPFVYWGQGTLVTVSSASTKGPSVFPLAPSSKSTSGGTAALGCLVKDYFPEPVTVSWNSGALTSGVHTFPAVLQSSGLYSLSSVVTVPSSSLGTQTYICNVNHKPSNTKVDKKVEPKSCDKTHTCPPCPAPELLGGPSVFLFPPKPKDTLMISRTPEVTCVVVDVSHEDPEVKFNWYVDGVEVHNAKTKPREEQYASTYRVVSVLTVLHQDWLNGKEYKCKVSNKALPAPIEKTISKAKGQPREPQVYTLPPSREEMTKNQVSLTCLVKGFYPSDIAVEWESNGQPENNYKTTPPVLDSDGSFFLYSKLTVDKSRWQQGNVFSCSVMHEALHNHYTQKSLSLSPG

SEQ ID NO: 2050 - protein, 448 aa, Artificial Sequence
  chemically synthesized
EVQLVESGGGLVQPGGSLRLSCAASGFTFSGYAMSWVRQAPGKGLEWVAYISNSGGNAHYADSVKGRFTISRDNSKNTLYLQMNSLRAEDTAVYYCTREDYGTSPFVYWGQGTLVTVSSASTKGPSVFPLAPSSKSTSGGTAALGCLVKDYFPEPVTVSWNSGALTSGVHTFPAVLQSSGLYSLSSVVTVPSSSLGTQTYICNVNHKPSNTKVDKKVEPKSCDKTHTCPPCPAPELLGGPSVFLFPPKPKDTLMISRTPEVTCVVVDVSHEDPEVKFNWYVDGVEVHNAKTKPREEQYQSTYRVVSVLTVLHQDWLNGKEYKCKVSNKALPAPIEKTISKAKGQPREPQVYTLPPSREEMTKNQVSLTCLVKGFYPSDIAVEWESNGQPENNYKTTPPVLDSDGSFFLYSKLTVDKSRWQQGNVFSCSVMHEALHNHYTQKSLSLSPG

SEQ ID NO: 2051 - protein, 445 aa, Artificial Sequence
  chemically synthesized
EVQLVESGGGLVQPGGSLRLSCAASGFTFSGYAMSWVRQAPGKGLEWVAYISNSGGNAHYADSVKGRFTISRDNSKNTLYLQMNSLRAEDTAVYYCTREDYGTSPFVYWGQGTLVTVSSASTKGPSVFPLAPCSRSTSESTAALGCLVKDYFPEPVTVSWNSGALTSGVHTFPAVLQSSGLYSLSSVVTVPSSSLGTKTYTCNVDHKPSNTKVDKRVESKYGPPCPPCPAPEFLGGPSVFLFPPKPKDTLMISRTPEVTCVVVDVSQEDPEVQFNWYVDGVEVHNAKTKPREEQFNSTYRVVSVLTVLHQDWLNGKEYKCKVSNKGLPSSIEKTISKAKGQPREPQVYTLPPSQEEMTKNQVSLTCLVKGFYPSDIAVEWESNGQPENNYKTTPPVLDSDGSFFLYSRLTVDKSRWQEGNVFSCSVMHEALHNHYTQKSLSLSLG

SEQ ID NO: 2052 - protein, 446 aa, Artificial Sequence; identical to SEQ ID NO: 2047
  chemically synthesized

SEQ ID NO: 2053 - protein, 445 aa, Artificial Sequence; identical to SEQ ID NO: 2051
  chemically synthesized

SEQ ID NO: 2054 - protein, 265 aa, Artificial Sequence
  chemically synthesized
QGQSGQGTSYCSIEHYPCNTHHGGGSSGGSISSGLLSGRSDNHGGGSDIQLTQSPSSLSASVGDRVTITCRASESVDAYGISFMNWFQQKPGKAPKLLIYAASNQGSGVPSRFSGSGSGTDFTLTISSMQPEDFATYYCQQSKDVPWTFGQGTKLEIKRTVAAPSVFIFPPSDEQLKSGTASVVCLLNNFYPREAKVQWKVDNALQSGNSQESVTEQDSKDSTYSLSSTLTLSKADYEKHKVYACEVTHQGLSSPVTKSFNRGEC

SEQ ID NO: 2055 - protein, 258 aa, Artificial Sequence
  chemically synthesized
TSYCSIEHYPCNTHHGGGSSGGSISSGLLSGRSDNHGGGSDIQLTQSPSSLSASVGDRVTITCRASESVDAYGISFMNWFQQKPGKAPKLLIYAASNQGSGVPSRFSGSGSGTDFTLTISSMQPEDFATYYCQQSKDVPWTFGQGTKLEIKRTVAAPSVFIFPPSDEQLKSGTASVVCLLNNFYPREAKVQWKVDNALQSGNSQESVTEQDSKDSTYSLSSTLTLSKADYEKHKVYACEVTHQGLSSPVTKSFNRGEC

SEQ ID NO: 2056 - protein, 265 aa, Artificial Sequence
  chemically synthesized
QGQSGQGTSYCSIEHYPCNTHHGGGSSGGSISSGLLSGRSDNPGGGSDIQLTQSPSSLSASVGDRVTITCRASESVDAYGISFMNWFQQKPGKAPKLLIYAASNQGSGVPSRFSGSGSGTDFTLTISSMQPEDFATYYCQQSKDVPWTFGQGTKLEIKRTVAAPSVFIFPPSDEQLKSGTASVVCLLNNFYPREAKVQWKVDNALQSGNSQESVTEQDSKDSTYSLSSTLTLSKADYEKHKVYACEVTHQGLSSPVTKSFNRGEC

SEQ ID NO: 2057 - protein, 258 aa, Artificial Sequence
  chemically synthesized
TSYCSIEHYPCNTHHGGGSSGGSISSGLLSGRSDNPGGGSDIQLTQSPSSLSASVGDRVTITCRASESVDAYGISFMNWFQQKPGKAPKLLIYAASNQGSGVPSRFSGSGSGTDFTLTISSMQPEDFATYYCQQSKDVPWTFGQGTKLEIKRTVAAPSVFIFPPSDEQLKSGTASVVCLLNNFYPREAKVQWKVDNALQSGNSQESVTEQDSKDSTYSLSSTLTLSKADYEKHKVYACEVTHQGLSSPVTKSFNRGEC

SEQ ID NO: 2058 - protein, 265 aa, Artificial Sequence
  chemically synthesized
QGQSGQGTSYCSIEHYPCNTHHGGGSSGGSISSGLLSGRSANPGGGSDIQLTQSPSSLSASVGDRVTITCRASESVDAYGISFMNWFQQKPGKAPKLLIYAASNQGSGVPSRFSGSGSGTDFTLTISSMQPEDFATYYCQQSKDVPWTFGQGTKLEIKRTVAAPSVFIFPPSDEQLKSGTASVVCLLNNFYPREAKVQWKVDNALQSGNSQESVTEQDSKDSTYSLSSTLTLSKADYEKHKVYACEVTHQGLSSPVTKSFNRGEC

SEQ ID NO: 2059 - protein, 258 aa, Artificial Sequence
  chemically synthesized
TSYCSIEHYPCNTHHGGGSSGGSISSGLLSGRSANPGGGSDIQLTQSPSSLSASVGDRVTITCRASESVDAYGISFMNWFQQKPGKAPKLLIYAASNQGSGVPSRFSGSGSGTDFTLTISSMQPEDFATYYCQQSKDVPWTFGQGTKLEIKRTVAAPSVFIFPPSDEQLKSGTASVVCLLNNFYPREAKVQWKVDNALQSGNSQESVTEQDSKDSTYSLSSTLTLSKADYEKHKVYACEVTHQGLSSPVTKSFNRGEC

1. An isolated antibody or antigen binding fragment thereof (AB) that specifically binds to mammalian PD-1, wherein the AB has one or more of the characteristics selected from the group consisting of:
(a) the AB inhibits binding of mammalian PD-1 to mammalian PDL1 with an EC₅₀ value less than 5 nM;
(b) the AB inhibits binding of mammalian PD-1 to mammalian PDL2 with an EC₅₀ value less than 5 nM; and
(c) the AB specifically binds to human PD-1 and cynomolgus monkey PD-1.

2. An activatable antibody that, in an activated state, specifically binds to mammalian PD-1, wherein said activatable antibody comprises:
an antibody or an antigen binding fragment thereof (AB) that specifically binds to mammalian PD-1;
a masking moiety (MM) that inhibits the binding of the AB to mammalian PD-1 when the activatable antibody is in an uncleaved state; and
a cleavable moiety (CM) coupled to the AB, wherein the CM is a polypeptide that functions as a substrate for a protease.

3. The activatable antibody of claim 2, wherein the AB specifically blocks a natural ligand of PD-1 from binding to the mammalian PD-1.

4. The activatable antibody of claim 2, wherein the activatable antibody has one or more of the characteristics selected from the group consisting of:
(i) the activatable antibody in an uncleaved state specifically binds to the mammalian PD-1 with a dissociation constant of:
0.5 nM to 1 nM, 0.5 nM to 2 nM, 0.5 nM to 5 nM, 0.5 nM to 10 nM, 0.5 nM to 15 nM, 0.5 nM to 20 nM, 0.5 nM to 25 nM, 0.5 nM to 50 nM, 0.5 nM to 75 nM, 0.5 nM to 100 nM, 0.5 nM to 150 nM, 0.5 nM to 200 nM, 0.5 nM to 300 nM, 0.5 nM to 400 nM,
1 nM to 2 nM, 1 nM to 5 nM, 1 nM to 10 nM, 1 nM to 15 nM, 1 nM to 20 nM, 1 nM to 25 nM, 1 nM to 50 nM, 1 nM to 75 nM, 1 nM to 100 nM, 1 nM to 150 nM, 1 nM to 200 nM, 1 nM to 300 nM, 1 nM to 400 nM,
2 nM to 5 nM, 2 nM to 10 nM, 2 nM to 15 nM, 2 nM to 20 nM, 2 nM to 25 nM, 2 nM to 50 nM, 2 nM to 75 nM, 2 nM to 100 nM, 2 nM to 150 nM, 2 nM to 200 nM, 2 nM to 300 nM, 2 nM to 400 nM,
5 nM to 10 nM, 5 nM to 15 nM, 5 nM to 20 nM, 5 nM to 25 nM, 5 nM to 50 nM, 5 nM to 75 nM, 5 nM to 100 nM, 5 nM to 150 nM, 5 nM to 200 nM, 5 nM to 300 nM, 5 nM to 400 nM,
10 nM to 15 nM, 10 nM to 20 nM, 10 nM to 25 nM, 10 nM to 50 nM, 10 nM to 75 nM, 10 nM to 100 nM, 10 nM to 150 nM, 10 nM to 200 nM, 10 nM to 300 nM, 10 nM to 400 nM,
15 nM to 20 nM, 15 nM to 25 nM, 15 nM to 50 nM, 15 nM to 75 nM, 15 nM to 100 nM, 15 nM to 150 nM, 15 nM to 200 nM, 15 nM to 300 nM, 15 nM to 400 nM,
20 nM to 25 nM, 20 nM to 50 nM, 20 nM to 75 nM, 20 nM to 100 nM, 20 nM to 150 nM, 20 nM to 200 nM, 20 nM to 300 nM, 20 nM to 400 nM,
25 nM to 50 nM, 25 nM to 75 nM, 25 nM to 100 nM, 25 nM to 150 nM, 25 nM to 200 nM, 25 nM to 300 nM, 25 nM to 400 nM,
50 nM to 75 nM, 50 nM to 100 nM, 50 nM to 150 nM, 50 nM to 200 nM, 50 nM to 300 nM, 50 nM to 400 nM,
75 nM to 100 nM, 75 nM to 150 nM, 75 nM to 200 nM, 75 nM to 300 nM, 75 nM to 400 nM,
150 nM to 200 nM, 150 nM to 300 nM, 150 nM to 400 nM,
200 nM to 300 nM, 200 nM to 400 nM, or
300 nM to 400 nM;
(ii) the activatable antibody in an activated state specifically binds to the mammalian PD-1 with a dissociation constant of:
0.01 nM to 5 nM, 0.05 nM to 5 nM, 0.1 nM to 5 nM, 0.2 nM to 5 nM, 0.3 nM to 5 nM, 0.4 nM to 5 nM, 0.5 nM to 5 nM, 0.75 nM to 5 nM, 1 nM to 5 nM, 2 nM to 5 nM,
0.01 nM to 2 nM, 0.05 nM to 2 nM, 0.1 nM to 2 nM, 0.2 nM to 2 nM, 0.3 nM to 2 nM, 0.4 nM to 2 nM, 0.5 nM to 2 nM, 0.75 nM to 1 nM, 1 nM to 2 nM,
0.01 nM to 1 nM, 0.05 nM to 1 nM, 0.1 nM to 1 nM, 0.2 nM to 1 nM, 0.3 nM to 1 nM, 0.4 nM to 1 nM, 0.5 nM to 1 nM, 0.75 nM to 1 nM,
0.01 nM to 0.75 nM, 0.05 nM to 0.75 nM, 0.1 nM to 0.75 nM, 0.2 nM to 0.75 nM, 0.3 nM to 0.75 nM, 0.4 nM to 0.75 nM, 0.5 nM to 0.75 nM,
0.01 nM to 0.5 nM, 0.05 nM to 0.5 nM, 0.1 nM to 0.5 nM, 0.2 nM to 0.5 nM, 0.3 nM to 0.5 nM, 0.4 nM to 0.5 nM,
0.01 nM to 0.4 nM, 0.05 nM to 0.4 nM, 0.1 nM to 0.4 nM, 0.2 nM to 0.4 nM, 0.3 nM to 0.4 nM,
0.01 nM to 0.3 nM, 0.05 nM to 0.3 nM, 0.1 nM to 0.3 nM, 0.2 nM to 0.3 nM,
0.01 nM to 0.2 nM, 0.05 nM to 0.2 nM, 0.1 nM to 0.2 nM,
0.01 nM to 0.1 nM, 0.05 nM to 0.1 nM, or
0.01 nM to 0.05 nM;
(iii) the activatable antibody comprises an AB that specifically binds to the mammalian PD-1 with a dissociation constant of:
0.01 nM to 5 nM, 0.05 nM to 5 nM, 0.1 nM to 5 nM, 0.2 nM to 5 nM, 0.3 nM to 5 nM, 0.4 nM to 5 nM, 0.5 nM to 5 nM, 0.75 nM to 5 nM, 1 nM to 5 nM, 2 nM to 5 nM,
0.01 nM to 2 nM, 0.05 nM to 2 nM, 0.1 nM to 2 nM, 0.2 nM to 2 nM, 0.3 nM to 2 nM, 0.4 nM to 2 nM, 0.5 nM to 2 nM, 0.75 nM to 1 nM, 1 nM to 2 nM,
0.01 nM to 1 nM, 0.05 nM to 1 nM, 0.1 nM to 1 nM, 0.2 nM to 1 nM, 0.3 nM to 1 nM, 0.4 nM to 1 nM, 0.5 nM to 1 nM, 0.75 nM to 1 nM,
0.01 nM to 0.75 nM, 0.05 nM to 0.75 nM, 0.1 nM to 0.75 nM, 0.2 nM to 0.75 nM, 0.3 nM to 0.75 nM, 0.4 nM to 0.75 nM, 0.5 nM to 0.75 nM,
0.01 nM to 0.5 nM, 0.05 nM to 0.5 nM, 0.1 nM to 0.5 nM, 0.2 nM to 0.5 nM, 0.3 nM to 0.5 nM, 0.4 nM to 0.5 nM,
0.01 nM to 0.4 nM, 0.05 nM to 0.4 nM, 0.1 nM to 0.4 nM, 0.2 nM to 0.4 nM, 0.3 nM to 0.4 nM,
0.01 nM to 0.3 nM, 0.05 nM to 0.3 nM, 0.1 nM to 0.3 nM, 0.2 nM to 0.3 nM,
0.01 nM to 0.2 nM, 0.05 nM to 0.2 nM, 0.1 nM to 0.2 nM,
0.01 nM to 0.1 nM, 0.05 nM to 0.1 nM, or
0.01 nM to 0.05 nM, and
(iv) the activatable antibody comprises an AB that blocks the ability of a natural ligand to bind to the mammalian PDL1 with an EC₅₀ of:
0.1 nM to 10 nM, 0.1 nM to 5 nM, 0.1 nM to 3 nM, 0.1 nM to 2 nM, 0.1 nM to 1 nM, 0.1 nM to 0.5 nM, 0.1 nM to 0.25 nM,
0.25 nM to 10 nM, 0.25 nM to 5 nM, 0.25 nM to 3 nM, 0.25 nM to 2 nM, 0.25 nM to 1 nM, 0.25 nM to 0.5 nM,
0.5 nM to 10 nM, 0.5 nM to 5 nM, 0.5 nM to 3 nM, 0.5 nM to 2 nM, 0.5 nM to 1 nM,
1 nM to 10 nM, 1 nM to 5 nM, 1 nM to 3 nM, 1 nM to 2 nM,
2 nM to 10 nM, 2 nM to 5 nM, 2 nM to 3 nM,
3 nM to 10 nM, 3 nM to 5 nM, or
5 nM to 10 nM.

5.-6. (canceled)

7. The activatable antibody of claim 2, wherein the mammalian PD-1 is selected from the group consisting of a human PD-1-, a murine PD-1, and a cynomolgus monkey PD-1; or wherein the mammalian PD-1 is a human PD-1.

8.-9. (canceled)

10. The activatable antibody of claim 2, wherein the AB has one or more of the characteristics selected from the group consisting of:
(a) the AB specifically binds human PD-1 and cynomolgus monkey PD-1;
(b) the AB inhibits binding of human PDL1 and human PDL2 to human PD-1;
(c) the AB inhibits binding of cynomolgus monkey PDL1 and cynomolgus monkey PDL2 to cynomolgus monkey PD-1;
(d) the AB specifically binds murine PD-1; and
(e) the AB specifically binds to human PD-1 or cynomolgus monkey PD-1 with a dissociation constant of less than 1 nM.

11. (canceled)

12. The activatable antibody of claim 4, wherein the natural ligand is a mammalian PDL1 or a mammalian PDL2, or wherein the natural ligand is selected from the group consisting of: a human PDL1, a human PDL2, a murine PDL1, a murine PDL2, a cynomolgus monkey PDL1, and a cynomolgus monkey PDL2.

13. (canceled)

14. The activatable antibody of claim 2, wherein:
(a) the AB induces type 1 diabetes in a non-obese diabetic (NOD) mouse; and
(b) the activatable antibody in an uncleaved state inhibits the induction of type 1 diabetes in a NOD mouse.

15. The activatable antibody of claim 14, wherein the activatable antibody inhibits the induction of type 1 diabetes in the NOD mouse after administration of the activatable antibody at a single dose of 3 mg/kg to 10 mg/kg, 3 mg/kg or 10 mg/kg, or wherein the AB induces type 1 diabetes in the NOD mouse after administration of the AB at a single dose of 1 mg/kg to 20 mg/kg, 1 mg/kg, 3 mg/kg, 5 mg/kg, 10 mg/kg or 20 mg/kg.

16. (canceled)

17. The activatable antibody of claim 2, wherein:
(a) the activatable antibody in an uncleaved state does not induce type 1 diabetes in greater than 50% of a population of non-obese diabetic (NOD) mice, and
(b) the AB induces type 1 diabetes in greater than 50%, greater than 60%, greater than 70%, greater than 80%, between 50% to 100%, between 50% and 75%, or between 70% and 90% of a population of NOD mice.

18. The activatable antibody of claim 17, wherein the activatable antibody does not induce type 1 diabetes in greater than 50%, greater than 60%, greater than 70%, greater than 80%, between 50% to 100%, between 50% and 75%, or between 70% and 90% of the population of NOD mice after administration to each mouse in the population a single dose of the activatable antibody at a dosage of: 3 mg/kg to 10 mg/kg, 3 mg/kg or 10 mg/kg.

19. The activatable antibody of claim 18, wherein the activatable antibody and the AB have one or more of the characteristics selected from the group consisting of:
(a) the activatable antibody in an uncleaved state does not induce type 1 diabetes in greater than 50%, greater than 60%, greater than 70%, greater than 80%, between 50% to 100%, between 50% and 75%, or between 70% and 90% of a population of non-obese diabetic (NOD) mice when administered at a single dose of 3 mg/kg; and the AB induces type 1 diabetes in greater than 50%, greater than 60%, greater than 70%, greater than 80%, between 50% to 100%, between 50% and 75%, or between 70% and 90% of a population of NOD mice, when administered at a single dose of 3 mg/kg; and
(b) the activatable antibody in an uncleaved state does not induce type 1 diabetes in greater than 50%, greater than 60%, greater than 70%, greater than 80%, between 50% to 100%, between 50% and 75%, or between 70% and 90% of a population of non-obese diabetic (NOD) mice when administered at a single dose of 10 mg/kg; and the AB induces type 1 diabetes in greater than 50%, greater than 60%, greater than 70%, greater than 80%, between 50% to 100%, between 50% and 75%, or between 70% and 90% of a population of NOD mice, when administered at a single dose of 10 mg/kg; and
(c) the AB of the activatable antibody induces type 1 diabetes in greater than 50%, greater than 60%, greater than 70%, greater than 80%, between 50% to 100%, between 50% and 75%, or between 70% and 90% of the population of the NOD mice after administration to each mouse in the population a single dose of the AB at a dosage of: 3 mg/kg to 20 mg/kg, 3 mg/kg, 5 mg/kg, 10 mg/kg or 20 mg/kg.

20.-21. (canceled)

22. The activatable antibody of claim 2, wherein the activatable antibody in an uncleaved state does not induce type 1 diabetes in greater than 50% of a population of non-obese diabetic (NOD) mice, wherein the population of NOD mice are concurrently dosed with an anti-CTLA4 antibody.

23. The activatable antibody of claim 22, wherein the population of NOD mice are each administered:
(a) a single dose of the activatable antibody at a dosage of 10 mg/kg;
(b) a single dose of the anti-CTLA4 antibody at a dosage of 10 mg/kg; or
(c) a single dose of the activatable antibody at a dosage of 10 mg/kg and a single dose of the anti-CTLA4 antibody at a dosage of 10 mg/kg.

24.-25. (canceled)

26. The activatable antibody of claim 14, wherein the NOD mouse is a female NOD/ShiLtJ mouse sub strain.

27. The activatable antibody of claim 26, wherein the population of NOD mice are each 5 weeks old when the activatable antibody is first administered, or wherein the population of NOD mice are each 10 weeks old when the activatable antibody is first administered.

28. (canceled)

29. The activatable antibody of claim 2, wherein the AB comprises:
(a) a variable heavy chain complementarity determining region 1 (VH CDR1) comprising an amino acid sequence selected from the group consisting of SEQ ID NOs: 653-657;
(b) a variable heavy chain complementarity determining region 2 (VH CDR2) comprising an amino acid sequence selected from the group consisting of SEQ ID NOs: 658-663;
(c) a variable heavy chain complementarity determining region 3 (VH CDR3) comprising an amino acid sequence selected from the group consisting of SEQ ID NOs: 664-668;
(d) a variable light chain complementarity determining region 1 (VL CDR1) comprising an amino acid sequence selected from the group consisting of SEQ ID NOs:669-677;
(e) a variable light chain complementarity determining region 2 (VL CDR2) comprising an amino acid sequence selected from the group consisting of SEQ ID NOs: 678-682; and
(f) a variable light chain complementarity determining region 3 (VL CDR3) comprising an amino acid sequence selected from the group consisting of SEQ ID NOs: 683-687.

30. The activatable antibody of claim 2, wherein the AB comprises a VH CDR1 sequence comprising GFTFSGYAMS (SEQ ID NO: 653); a VH CDR2 sequence comprising YISNSGGNAH (SEQ ID NO: 658); a VH CDR3 sequence comprising EDYGTSPFVY (SEQ ID NO: 664); a VL CDR1 sequence comprising RASESVDAYGISFMN (SEQ ID NO: 676); a VL CDR2 sequence comprising AASNQGS (SEQ ID NO: 678); and a VL CDR3 sequence comprising QQSKDVPWT (SEQ ID NO: 683), or wherein the AB comprises a VH CDR1 sequence comprising GFTFSGYAMS (SEQ ID NO: 653); a VH CDR2 sequence comprising YISNSGGNAH (SEQ ID NO: 658); a VH CDR3 sequence comprising EDYGTSPFVY (SEQ ID NO: 664); a VL CDR1 sequence comprising RASESVDSYGISFMN (SEQ ID NO: 675); a VL CDR2 sequence comprising AASNQGS (SEQ ID NO: 678); and a VL CDR3 sequence comprising QQSKDVPWT (SEQ ID NO: 683).

31. (canceled)

32. The activatable antibody of claim 2, wherein the AB comprises a combination of a variable heavy chain (VH) and a variable light chain (VL) selected from the group consisting of:
(a) a variable heavy chain (VH) comprising an amino acid sequence selected from the group consisting of SEQ ID NOs: 21, 23, 25, 27, 29, 31, 33, 35, 37, 2052, and 2053, and a variable light chain (VL) comprising an amino acid sequence selected from the group consisting of SEQ ID NO: 39, 41, 43, 45, 47, 49, 51, 53, 55, 57, and 59;
(b) a VH comprising an amino acid sequence selected from the group consisting of SEQ ID NO: 21, 2052, and 2053, and a VL comprising the amino acid sequence of SEQ ID NO: 45 and 47;
(c) a VH comprising the amino acid sequence of SEQ ID NO: 21 and a VL comprising the amino acid sequence of SEQ ID NO: 45; and
(d) a VH comprising the amino acid sequence of SEQ ID NO: 21 and a VL comprising the amino acid sequence of SEQ ID NO: 47.

33.-34. (canceled)

35. The activatable antibody of claim 2, wherein the MM has one or more of the characteristics selected from the group consisting of:
(a) the MM has a dissociation constant for binding to the AB that is greater than the dissociation constant of the AB to PD-1;
(b) the MM does not interfere or compete with the AB for binding to PD-1 when the activatable antibody is in a cleaved state;
(c) the MM is a polypeptide of no more than 40 amino acids in length;
(d) the MM polypeptide sequence is different from that of human PD-1;
(e) the MM polypeptide sequence is no more than 50% identical to any natural binding partner of the AB;
(f) the MM polypeptide sequence is no more than 25% identical to any natural binding partner of the AB;
(g) the MM comprises an amino acid sequence selected from the group consisting of SEQ ID NOs: 66-213, 384-514, and 548-571;
(h) the MM comprises an amino acid sequence selected from the group consisting of SEQ ID NOs: 384-514 and 548-571; and
(i) the MM comprises an amino acid sequence selected from the group consisting of SEQ ID NOs: 66, 67, 70, 71, 74, 77, 81, 82, 84, 90, 91, 93, and 99.

36.-43. (canceled)

44. The activatable antibody of claim 2, wherein the CM has one or more of the characteristics selected from the group consisting of:
(a) the CM is a substrate for a protease that is active in diseased tissue;
the CM comprises an amino acid sequence selected from the group consisting of SEQ ID NOs: 214, 294-361, 1092-1112, 1157, 1158, 1161, 1162, 1165, 1166, 1169, 1520, and 1695-1704; and
(c) the CM comprises an amino acid sequence selected from the group consisting of SEQ ID NOs: 214, 294, 300, 302, 303, 305, 308, 318, 347, 361, 1092-1102, 1111, and 1157.

45.-46. (canceled)

47. The activatable antibody of claim 2, wherein the AB has one or more of the characteristics selected from the group consisting of:
(a) the AB is an antigen binding fragment selected from the group consisting of a Fab fragment, a F(ab′)₂ fragment, a scFv, a scAb, a dAb, a single domain heavy chain antibody, and a single domain light chain antibody;
(b) the AB is a monoclonal antibody;
(c) the AB is linked to the CM;
(d) the AB is linked directly to the CM; and
(e) the AB is linked to the CM via a linking peptide.

48.-50. (canceled)

51. The activatable antibody of claim 2, wherein the MM is linked to the CM such that the activatable antibody in an uncleaved state comprises the structural arrangement from N-terminus to C-terminus as follows: MM-CM-AB or AB-CM-MM.

52. The activatable antibody of claim 51, wherein the activatable antibody comprises a linking peptide between the MM and the CM, wherein the activatable antibody comprises a linking peptide between the CM and the AB, or wherein the activatable antibody comprises a linking peptide between the MM and the CM and a linking peptide between the CM and the AB.

53. (canceled)

54. The activatable antibody of claim 51, wherein the activatable antibody comprises a first linking peptide (LP1) and a second linking peptide (LP2), and wherein the activatable antibody in the uncleaved state has the structural arrangement from N-terminus to C-terminus as follows: MM-LP1-CM-LP2-AB or AB-LP2-CM-LP1-MM.

55. The activatable antibody of claim 55, wherein LP1 and LP2 have one or more of the characteristics selected from the group consisting of:
(a) the two linking peptides need not be identical to each other; and
(b) each of LP1 and LP2 is a peptide of about 1 to 20 amino acids in length.

56. (canceled)

57. The activatable antibody of claim 2 comprising an amino acid sequence selected from the group consisting of:
(i) an amino acid sequence selected from the group consisting of SEQ ID NOs: 215, 217, 219, 221, 223, 225, 227, 229, 231, 233, 235, 237, 239, 241, 243, 245, 247, 249, 251, 253, 255, 257, 259, 261, 263, 265, 267, 269, 271, 273, 275, 277, 279, 281, 283, 285, 287, 289, 291, 293, 919, 921, 923, 925, 927, 929, 931, 933, 935, 937, 939, 941, 943, 945, 947, 949, 951, 953, 955, 957, 959, 961, 963, 965, 967, 969, 971, 973, 975, 977, 979, 981, 983, 985, 987, 989, 991, 993, 995, 997, 1028, 1029, 1041-1076, 1138, 1139, 1143, 1144, 1147, 1148, 1151, 1152, 1155, 1156, 1159, 1160, 1163, 1164, 1167, 1168, 1170, 1171, 1174, 1175, 1178, 1179, 1182, 1183, 1186, 1187, 1190, 1191, 1194, 1195, 1198, 1199, 1202, 1203, 2055, 2054, 2057, 2056, 2059, and 2058;
(ii) an amino acid sequence selected from the group consisting of SEQ ID NOs: 919, 921, 923, 925, 927, 929, 931, 933, 935, 937, 939, 941, 943, 945, 947, 949, 951, 953, 955, 957, 959, 961, 963, 965, 967, 969, 971, 973, 975, 977, 979, 981, 983, 985, 987, 989, 991, 993, 995, 997, 1028, 1041-1076, 1138, 1144, 1148, 1152, 1156, 1160, 1164, 1168, 1170, 1174, 1178, 1182, 1186, 1190, 1194, 1198, 1202, 2055, 2057, and 2059;
(iii) an amino acid sequence selected from the group consisting of SEQ ID NOs: 215, 217, 219, 221, 223, 225, 227, 229, 231, 233, 235, 237, 239, 241, 243, 245, 247, 249, 251, 253, 255, 257, 259, 261, 263, 265, 267, 269, 271, 273, 275, 277, 279, 281, 283, 285, 287, 289, 291, 293, 1029, 1139, 1143, 1147, 1151, 1155, 1159, 1163, 1167, 1171, 1175, 1179, 1183, 1187, 1191, 1195, 1199, 1203, 2054, 2056, and 2058;
(iv) an amino acid sequence selected from the group consisting of SEQ ID NOS: 515, 517, 519, 521, 523, 525, 527, 529, 531, 533, 535, 537, 539, 541, 572, 574, 576, 578, 580, 582, 999, 1001, 1003, 1005, 1007, 1009, 1011, 1013, 1015, 1017, 1019, 1021, 1023, 1025, 1027, 1030, 1032, 1034, 1036, 1039, 1077-1090, 1113-1120, 1123, 1124, 1127, 1128, 1131, 1132, 1134, and 1135;
(v) an amino acid sequence selected from the group consisting of SEQ ID NOS: 999, 1001, 1003, 1005, 1007, 1009, 1011, 1013, 1015, 1017, 1019, 1021, 1023, 1025, 1027, 1030, 1032, 1034, 1036, 1039, 1070-1090, 1119, 1123, 1127, 1131, and 1134; and
(vi) an amino acid sequence selected from the group consisting of SEQ ID NOS: 515, 517, 519, 521, 523, 525, 527, 529, 531, 533, 535, 537, 539, 541, 572, 574, 576, 578, 580, 582, 1120, 1124, 1128, 1132, and 1135.

58.-62. (canceled)

63. The activatable antibody of claim 2, wherein the AB comprises:
(i) a combination of the complementarity determining region (CDR) sequences of the heavy chain amino acid sequence of SEQ ID NO: 1346 and the CDR sequences of the light chain amino acid sequence of SEQ ID NO: 626; or (ii) a combination of a VH CDR1 sequence, a VH CDR2 sequence, a VH CDR3 sequence, a VL CDR1 sequence, a VL CDR2 sequence, and a VL CDR3 sequence, wherein the VH CDR1 sequence comprises GITFSNSG (SEQ ID NO: 1705); the VH CDR2 sequence comprises IWYDGSKR (SEQ ID NO: 1706); the VH CDR3 sequence comprises TNDDY (SEQ ID NO: 1707); the VL CDR1 sequence comprises QSVSSY (SEQ ID NO: 1708); the VL CDR2 sequence comprises DAS (SEQ ID NO: 1709); and the VL CDR3 sequence comprises QQSSNWPRT (SEQ ID NO: 1710); or (iii) the AB comprises a heavy chain comprising the amino acid sequence of SEQ ID NO: 1346 and a light chain comprising the amino acid sequence of SEQ ID NO: 626.

64. The activatable antibody of claim 63, wherein the MM comprises an amino acid sequence selected from the group consisting of SEQ ID NOs: 1206-1295.

65. (canceled)

66. The activatable antibody of claim 63 comprising an amino acid sequence selected from the group consisting of:
(a) an amino acid sequence selected from the group consisting of SEQ ID NOs: 1296, 1297, 1300, 1301, 1304, 1305, 1308, 1309, 1312, 1313, 1316, 1317, 1320, 1321, 1324, 1325, 1328, 1329, 1332, 1333, 1336, 1337, 1340, and 1341;
(b) an amino acid sequence selected from the group consisting of SEQ ID NOs: 1297, 1301, 1305, 1309, 1313, 1317, 1321, 1325, 1329, 1333, 1337, and 1341; and
(c) an amino acid sequence selected from the group consisting of SEQ ID NOs: 1296, 1300, 1304, 1308, 1312, 1316, 1320, 1324, 1328, 1332, 1336, and 1340.

67. (canceled)

68. The activatable antibody of claim 2, wherein the AB comprises:
(i) a combination of the complementarity determining region (CDR) sequences of the heavy chain amino acid sequence of SEQ ID NO: 1514 and the CDR sequences of the light chain amino acid sequence of SEQ ID NO: 638 or (ii) a combination of a VH CDR1 sequence, a VH CDR2 sequence, a VH CDR3 sequence, a VL CDR1 sequence, a VL CDR2 sequence, and a VL CDR3 sequence, wherein the VH CDR1 sequence comprises GYTFTNYY (SEQ ID NO: 1711); the VH CDR2 sequence comprises INPSNGGT (SEQ ID NO: 1712); the VH CDR3 sequence comprises RRDYRFDMGFDY (SEQ ID NO: 1713); the VL CDR1 sequence comprises KGVSTSGYSY (SEQ ID NO: 1714); the VL CDR2 sequence comprises LAS (SEQ ID NO: 1715); and the VL CDR3 sequence comprises QHSRDLPLT (SEQ ID NO: 1716); or
(ii) the AB comprises a heavy chain comprising the amino acid sequence of SEQ ID NO: 1514 and a light chain comprising the amino acid sequence of SEQ ID NO: 638.

69. The activatable antibody of claim 68, wherein the MM comprises an amino acid sequence selected from the group consisting of SEQ ID NOs: 1351-1465.

70. (canceled)

71. The activatable antibody of claim 69 comprising an amino acid sequence selected from the group consisting of:
(a) an amino acid sequence selected from the group consisting of SEQ ID NOs: 1466, 1467, 1470, 1471, 1474, 1475, 1478, 1479, 1482, 1483, 1486, 1487, 1490, 1491, 1494, 1495, 1498, 1499, 1502, 1503, 1506, 1507, 1510, and 1511;
(b) an amino acid sequence selected from the group consisting of SEQ ID NOs: 1467, 1471, 1475, 1479, 1483, 1487, 1491, 1495, 1499, 1503, 1507, and 1511; and
(c) an amino acid sequence selected from the group consisting of SEQ ID NOs: 1466, 1470, 1474, 1478, 1482, 1486, 1490, 1494, 1498, 1502, 1506, and 1510.

72. (canceled)

73. A conjugated activatable antibody comprising the activatable antibody of claim 2 conjugated to an agent.

74. The conjugated activatable antibody of claim 73, wherein the agent has one or more of the following characteristics selected from the group consisting of:
(a) the agent is conjugated to the activatable antibody via a linker;
(b) the agent is conjugated to the activatable antibody via a cleavable linker,
(c) the linker is conjugated to the activatable antibody via a non-cleavable linker;
(d) the agent is a detectable moiety; and
(e) the agent is a diagnostic agent.

75.-78. (canceled)

79. A pharmaceutical composition comprising the conjugated activatable antibody of claim 73 and a carrier.

80. A pharmaceutical composition comprising the activatable antibody of claim 2.

81. The pharmaceutical composition of claim 79 comprising an additional agent.

82. The pharmaceutical composition of claim 80 comprising an additional agent.

83. The pharmaceutical composition of claim 81, wherein the additional agent is a therapeutic agent.

84. The pharmaceutical composition of claim 82, wherein the additional agent is a therapeutic agent.

85. An isolated nucleic acid molecule encoding the activatable antibody of claim 2.

86. A vector comprising the isolated nucleic acid molecule of claim 85.

87. A method of producing an activatable antibody by culturing a cell under conditions that lead to expression of the activatable antibody, wherein the cell comprises the nucleic acid molecule of claim 85.

88. A method of manufacturing an activatable antibody that, in an activated state, binds to PD-1, the method comprising:
(a) culturing a cell comprising a nucleic acid construct that encodes the activatable antibody of claim 2 under conditions that lead to expression of the activatable antibody; and
(b) recovering the activatable antibody.

89. A method of reducing binding of a ligand selected from the group consisting of PDL1 or PDL2 to PD-1 on T cells comprising administering an effective amount of the activatable antibody of claim 2 to a subject in need thereof.

90.-91. (canceled)

92. A method of reducing immune suppression comprising administering to a subject in need thereof a therapeutically effective amount of the activatable antibody of claim 2.

93. The method of claim 92, wherein the immune suppression is mediated by engagement of PD-1 on T cells to PDL1 or PDL2 on tumor or other immune cells.

94. A method of treating, alleviating a symptom of, or delaying the progression of a disorder or disease comprising administering to a subject in need thereof a therapeutically effective amount of the activatable antibody of claim 2.

95. The method of claim 84, wherein the PDL1-mediated disorder or disease is cancer.

96. The method of claim 95, wherein the cancer is selected from the group consisting of:
(a) a bladder cancer, a bone cancer, a breast cancer, a carcinoid, a cervical cancer, a cholangiocarcinoma, a colon cancer, an endometrial cancer, a glioma, a head and neck cancer, a liver cancer, a lung cancer, a lymphoma, a melanoma, an ovarian cancer, a pancreatic cancer, a prostate cancer, a renal cancer, a sarcoma, a skin cancer, a stomach cancer, a testis cancer, a thymus cancer, a thyroid cancer, a urogenital cancer, and a urothelial cancer; and
(b) melanoma (MEL), renal cell carcinoma (RCC), squamous non-small cell lung cancer (NSCLC), non-squamous NSCLC, colorectal cancer (CRC), castration-resistant prostate cancer (CRPC), hepatocellular carcinoma (HCC), squamous cell carcinoma of the head and neck, thymoma, carcinomas of the esophagus, ovary, gastrointestinal tract and breast, or a hematologic malignancy such as multiple myeloma, B-cell lymphoma, T-cell lymphoma, Hodgkin's lymphoma, primary mediastinal B-cell lymphoma, and chronic myelogenous leukemia.

97. (canceled)

98. The method of claim 89, wherein the method comprises administering an additional agent.

99. The method of claim 98, wherein the additional agent is a therapeutic agent.

100. The antibody of claim 1, wherein the AB comprises:
(i) a combination of a variable heavy chain complementarity determining region 1 (VH CDR1), a variable heavy chain complementarity determining region 2 (VH CDR2), a variable heavy chain complementarity determining region 3 (VH CDR3), a variable light chain complementarity determining region 1 (VL CDR1), a variable light chain complementarity determining region 2 (VL CDR2), and a variable light chain complementarity determining region 3 (VL CDR3) selected from the group consisting of:
(a) a VH CDR1 comprising an amino acid sequence selected from the group consisting of SEQ ID NOs: 653-657;
(b) a VH CDR2 comprising an amino acid sequence selected from the group consisting of SEQ ID NOs: 658-663;
(c) a VH CDR3 comprising an amino acid sequence selected from the group consisting of SEQ ID NOs: 664-668;
(d) a VL CDR1 comprising an amino acid sequence selected from the group consisting of SEQ ID NOs:669-677;
(e) a VL CDR2 comprising an amino acid sequence selected from the group consisting of SEQ ID NOs: 678-682; and
(f) a VL CDR3 comprising an amino acid sequence selected from the group consisting of SEQ ID NOs: 683-687;
(ii) a variable heavy chain complementarity determining region 1 (VH CDR1), a variable heavy chain complementarity determining region 2 (VH CDR2), a variable heavy chain complementarity determining region 3 (VH CDR3), a variable light chain complementarity determining region 1 (VL CDR1), a variable light chain complementarity determining region 2 (VL CDR2), and a variable light chain complementarity determining region 3 (VL CDR3) selected from the group consisting of:
(a) a VH CDR1 sequence comprising GFTFSGYAMS (SEQ ID NO: 653); a VH CDR2 sequence comprising YISNSGGNAH (SEQ ID NO: 658); a VH CDR3 sequence comprising EDYGTSPFVY (SEQ ID NO: 664); a VL CDR1 sequence comprising RASESVDAYGISFMN (SEQ ID NO: 676); a VL CDR2 sequence comprising AASNQGS (SEQ ID NO: 678); and a VL CDR3 sequence comprising QQSKDVPWT (SEQ ID NO: 683); and
(b) a VH CDR1 sequence comprising GFTFSGYAMS (SEQ ID NO: 653); a VH CDR2 sequence comprising YISNSGGNAH (SEQ ID NO: 658); a VH CDR3 sequence comprising EDYGTSPFVY (SEQ ID NO: 664); a VL CDR1 sequence comprising RASESVDSYGISFMN (SEQ ID NO: 675); a VL CDR2 sequence comprising AASNQGS (SEQ ID NO: 678); and a VL CDR3 sequence comprising QQSKDVPWT (SEQ ID NO: 683); or
(iii) a combination of a variable heavy chain (VH) and a variable light chain (VL) selected from the group consisting of:
(a) a VH comprising an amino acid sequence selected from the group consisting of SEQ ID NOs: 21, 23, 25, 27, 29, 31, 33, 35, 37, 2052, and 2053, and a VL comprising an amino acid sequence selected from the group consisting of SEQ ID NO: 39, 41, 43, 45, 47, 49, 51, 53, 55, 57, and 59;
(b) a VH comprising an amino acid sequence selected from the group consisting of SEQ ID NO: 21, 2052, and 2053, and a VL comprising the amino acid sequence of SEQ ID NO: 47;
(c) a VH comprising the amino acid sequence of SEQ ID NO: 21 and a VL comprising the amino acid sequence of SEQ ID NO: 45; and
(d) a VH comprising the amino acid sequence of SEQ ID NO: 21 and a VL comprising the amino acid sequence of SEQ ID NO: 47.

101. An isolated nucleic acid molecule encoding the antibody of claim 1.

102. A vector comprising the isolated nucleic acid molecule of claim 101.

103. A method of producing an antibody by culturing a cell under conditions that lead to expression of the antibody, wherein the cell comprises a nucleic acid construct that encodes the antibody of claim 1 under conditions that lead to expression of the antibody, and recovering the antibody.

104. A method of reducing immune suppression comprising administering to a subject in need thereof a therapeutically effective amount of the antibody of claim 1.

105. A method of reducing binding of a ligand selected from the group consisting of PDL1 or PDL2 to PD-1 on T cells comprising administering to a subject in need thereof a therapeutically effective amount of the isolated antibody of claim 1.

106. The method of claim 105, wherein the ligand is located on a tumor or other immune cell.

107. A method of treating, alleviating a symptom of, or delaying the progression of a disorder or disease comprising administering to a subject in need thereof a therapeutically effective amount of the antibody of claim 1.

108. The method of claim 107, wherein the PDL1-mediated disorder or disease is cancer.

109. The method of claim 107, wherein the method comprises administering an additional agent.

110. The method of claim 109, wherein the additional agent is a therapeutic agent.
